(19) United States
(12) Patent Application Publication
(10) Pub. No.: US 2011/0145949 A1
(43) Pub. Date: Jun. 16, 2011

(54) Plants Having Enhanced Yield-Related Traits and a Method for Making the Same

(75) Inventors: Yves Hatzfeld, Lille (FR); Christophe Reuzeau, Tocan Saint Apre (FR); Valerie Frankard, Waterloo (BE); Ana Isabel Sanz Molinero, Gentbrugge (BE)

(73) Assignees: BASF Plant Science GmbH, Ludwigshafen (DE); CropDesign N.V., Gent (BE)

(21) Appl. No.: 13/059,761

(22) PCT Filed: Aug. 10, 2009
(86) PCT No.: PCT/EP2009/060337

§ 371 Date: Feb. 18, 2011

Related U.S. Application Data
(60) Provisional application No. 61/090,623, filed on Aug. 21, 2008.
(60) Provisional application No. 61/091,008, filed on Aug. 22, 2008.
(60) Provisional application No. 61/091,067, filed on Aug. 22, 2008.
(60) Provisional application No. 61/091,517, filed on Aug. 25, 2008.

(30) Foreign Application Priority Data
Aug. 20, 2008 (EP) 08162687.1
Aug. 22, 2008 (EP) 08162817.4
Aug. 22, 2008 (EP) 08162831.5
Aug. 22, 2008 (EP) 08162847.1

(51) Int. Cl. A01H 1/06; A01H 5/00; C12N 15/63; A01H 5/10; C07H 21/00; C07K 2/00

(52) U.S. Cl. 800/290; 800/298; 435/320.1; 800/320.2; 800/320.1; 800/320.3; 800/320; 536/23.1; 530/350

(57) ABSTRACT

The present invention relates generally to the field of molecular biology and concerns a method for enhancing various economically important yield-related traits in plants. More specifically, the present invention concerns a method for enhancing yield-related traits in plants by modulating expression in a plant of a nucleic acid encoding a bHLH9 (basic-Helix-Loop-Helix group 9) polypeptide. The present invention also concerns plants having modulated expression of a nucleic acid encoding a bHLH9 polypeptide, which plants have enhanced yield-related traits relative to control plants. The invention also provides hither-to unknown BHLH9-encoding nucleic acids and constructs comprising the same, useful in performing the methods of the invention. Furthermore, the present invention relates generally to the field of molecular biology and concerns a method for improving various plant growth characteristics by modulating expression in a plant of a nucleic acid encoding an IMB1 (Imbibition-inducible 1) polypeptide. The present invention also concerns plants having modulated expression of a nucleic acid encoding an IMB1 polypeptide, which plants have improved growth characteristics relative to corresponding wild type plants or other control plants. The invention also provides constructs useful in the methods of the invention. Yet furthermore, the present invention relates generally to the field of molecular biology and concerns a method for improving various plant growth characteristics by modulating expression in a plant of a nucleic acid encoding a PCD-like (Pterin-4-alpha-carbinolamine dehydratase-like). The present invention also concerns plants having modulated expression of a nucleic acid encoding a PCD-like, which plants have improved growth characteristics relative to corresponding wild type plants or other control plants. The invention also provides constructs useful in the methods of the invention. Furthermore the present invention relates generally to the field of molecular biology and concerns a method for increasing various plant yield-related traits by increasing expression in a plant of a nucleic acid sequence encoding a pseudo response regulator type 2 (PRR2) polypeptide. The present invention also concerns plants having increased expression of a nucleic acid sequence encoding a PRR2 polypeptide, which plants have increased yield-related traits relative to control plants. The invention additionally relates to nucleic acid sequences, nucleic acid constructs, vectors and plants containing said nucleic acid sequences.

[0001] The present invention relates generally to the field of molecular biology and concerns a method for enhancing various economically important yield-related traits in plants. More specifically, the present invention concerns a method for enhancing yield-related traits in plants by modulating expression in a plant of a nucleic acid encoding a bHLH9 (basic-Helix-Loop-Helix group 9) polypeptide. The present invention also concerns plants having modulated expression of a nucleic acid encoding a bHLH9 polypeptide, which plants have enhanced yield-related traits relative to control plants. The invention also provides hitherto unknown BHLH9-encoding nucleic acids and constructs comprising the same, useful in performing the methods of the invention.

[0002] Furthermore, the present invention relates generally to the field of molecular biology and concerns a method for improving various plant growth characteristics by modulating expression in a plant of a nucleic acid encoding an IMB1 (Imbibition-inducible 1) polypeptide. The present invention also concerns plants having modulated expression of a nucleic acid encoding an IMB1 polypeptide, which plants have improved growth characteristics relative to corresponding wild type plants or other control plants. The invention also provides constructs useful in the methods of the invention.

[0003] Yet furthermore, the present invention relates generally to the field of molecular biology and concerns a method for improving various plant growth characteristics by modulating expression in a plant of a nucleic acid encoding a PCD-like (Pterin-4-alpha-carbinolamine dehydratase-like). The present invention also concerns plants having modulated expression of a nucleic acid encoding a PCD-like, which plants have improved growth characteristics relative to corresponding wild type plants or other control plants. The invention also provides constructs useful in the methods of the invention.

[0004] Furthermore the present invention relates generally to the field of molecular biology and concerns a method for increasing various plant yield-related traits by increasing expression in a plant of a nucleic acid sequence encoding a pseudo response regulator type 2 (PRR2) polypeptide. The present invention also concerns plants having increased expression of a nucleic acid sequence encoding a PRR2 polypeptide, which plants have increased yield-related traits relative to control plants. The invention additionally relates to nucleic acid sequences, nucleic acid constructs, vectors and plants containing said nucleic acid sequences.

[0005] The ever-increasing world population and the dwindling supply of arable land available for agriculture fuels research towards increasing the efficiency of agriculture. Conventional means for crop and horticultural improvements utilise selective breeding techniques to identify plants having desirable characteristics. However, such selective breeding techniques have several drawbacks, namely that these techniques are typically labour intensive and result in plants that often contain heterogeneous genetic components that may not always result in the desirable trait being passed on from parent plants. Advances in molecular biology have allowed mankind to modify the germplasm of animals and plants. Genetic engineering of plants entails the isolation and manipulation of genetic material (typically in the form of DNA or RNA) and the subsequent introduction of that genetic material into a plant. Such technology has the capacity to deliver crops or plants having various improved economic, agronomic or horticultural traits.

[0006] A trait of particular economic interest is increased yield. Yield is normally defined as the measurable produce of economic value from a crop. This may be defined in terms of quantity and/or quality. Yield is directly dependent on several factors, for example, the number and size of the organs, plant architecture (for example, the number of branches), seed production, leaf senescence and more. Root development, nutrient uptake, stress tolerance and early vigour may also be important factors in determining yield. Optimizing the abovementioned factors may therefore contribute to increasing crop yield.

[0007] Seed yield is a particularly important trait, since the seeds of many plants are important for human and animal nutrition. Crops such as corn, rice, wheat, canola and soybean account for over half the total human caloric intake, whether through direct consumption of the seeds themselves or through consumption of meat products raised on processed seeds. They are also a source of sugars, oils and many kinds of metabolites used in industrial processes. Seeds contain an embryo (the source of new shoots and roots) and an endosperm (the source of nutrients for embryo growth during germination and during early growth of seedlings). The development of a seed involves many genes, and requires the transfer of metabolites from the roots, leaves and stems into the growing seed. The endosperm, in particular, assimilates the metabolic precursors of carbohydrates, oils and proteins and synthesizes them into storage macromolecules to fill out the grain.

[0008] Plant biomass is yield for forage crops like alfalfa, silage corn and hay. Many proxies for yield have been used in grain crops. Chief amongst these are estimates of plant size. Plant size can be measured in many ways depending on species and developmental stage, but include total plant dry weight, above-ground dry weight, above-ground fresh weight, leaf area, stem volume, plant height, rosette diameter, leaf length, root length, root mass, tiller number and leaf number. Many species maintain a conservative ratio between the size of different parts of the plant at a given developmental stage. These allometric relationships are used to extrapolate from one of these measures of size to another (e.g. Tittonell et al 2005 Agric Ecosys & Environ 105: 213). Plant size at an early developmental stage will typically correlate with plant size later in development. A larger plant with a greater leaf area can typically absorb more light and carbon dioxide than a smaller plant and therefore will likely gain a greater weight during the same period (Fasoula & Tollenaar 2005 Maydica 50:39). This is in addition to the potential continuation of the micro-environmental or genetic advantage that the plant had to achieve the larger size initially. There is a strong genetic component to plant size and growth rate (e.g. ter Steege et al 2005 Plant Physiology 139:1078), and so for a range of diverse genotypes plant size under one environmental condition is likely to correlate with size under another (Hittalmani et al 2003 Theoretical Applied Genetics 107:679). In this way a standard environment is used as a proxy for the diverse and dynamic environments encountered at different locations and times by crops in the field.

[0009] Another important trait for many crops is early vigour. Improving early vigour is an important objective of modern rice breeding programs in both temperate and tropical rice cultivars. Long roots are important for proper soil anchorage in water-seeded rice. Where rice is sown directly into flooded fields, and where plants must emerge rapidly through water, longer shoots are associated with vigour. Where drill-seeding is practiced, longer mesocotyls and coleoptiles are important for good seedling emergence. The ability to engineer early vigour into plants would be of great importance in agriculture. For example, poor early vigour has been a limitation to the introduction of maize (Zea mays L.) hybrids based on Corn Belt germplasm in the European Atlantic.

[0010] Harvest index, the ratio of seed yield to aboveground dry weight, is relatively stable under many environmental conditions and so a robust correlation between plant size and grain yield can often be obtained (e.g. Rebetzke et al 2002 Crop Science 42:739). These processes are intrinsically linked because the majority of grain biomass is dependent on current or stored photosynthetic productivity by the leaves and stem of the plant (Gardener et al 1985 Physiology of Crop Plants. Iowa State University Press, pp 68-73). Therefore, selecting for plant size, even at early stages of development, has been used as an indicator for future potential yield (e.g. Tittonell et al 2005 Agric Ecosys & Environ 105: 213). When testing for the impact of genetic differences on stress tolerance, the ability to standardize soil properties, temperature, water and nutrient availability and light intensity is an intrinsic advantage of greenhouse or plant growth chamber environments compared to the field. However, artificial limitations on yield due to poor pollination due to the absence of wind or insects, or insufficient space for mature root or canopy growth, can restrict the use of these controlled environments for testing yield differences. Therefore, measurements of plant size in early development, under standardized conditions in a growth chamber or greenhouse, are standard practices to provide indication of potential genetic yield advantages.

[0011] Another trait of importance is that of improved abiotic stress tolerance. Abiotic stress is a primary cause of crop loss worldwide, reducing average yields for most major crop plants by more than 50% (Wang et al. (2003) Planta 218: 1-14). Abiotic stresses may be caused by drought, salinity, extremes of temperature, chemical toxicity, excess or deficiency of nutrients (macroelements and/or microelements), radiation and oxidative stress. The ability to increase plant tolerance to abiotic stress would be of great economic advantage to farmers worldwide and would allow for the cultivation of crops during adverse conditions and in territories where cultivation of crops may not otherwise be possible.

[0012] Crop yield may therefore be increased by optimising one of the above-mentioned factors.

[0013] Depending on the end use, the modification of certain yield traits may be favoured over others. For example for applications such as forage or wood production, or bio-fuel resource, an increase in the vegetative parts of a plant may be desirable, and for applications such as flour, starch or oil production, an increase in seed parameters may be particularly desirable. Even amongst the seed parameters, some may be favoured over others, depending on the application. Various mechanisms may contribute to increasing seed yield, whether that is in the form of increased seed size or increased seed number.

[0014] One approach to increase yield-related traits (seed yield and/or biomass) in plants may be through modification of the inherent growth mechanisms of a plant, such as the cell cycle or various signalling pathways involved in plant growth or in defense mechanisms.

[0015] Concerning bHLH9 polypeptides, it has now been found that various yield-related traits may be improved in plants by modulating expression in a plant of a nucleic acid encoding a bHLH9 (basic-Helix-Loop-Helix group 9) polypeptide in a plant.

[0016] Concerning IMB1 polypeptides, it has now been found that various growth characteristics may be improved in plants by modulating expression in a plant of a nucleic acid encoding an IMB1 (Imbibition-inducible 1) polypeptide in a plant.

[0017] Concerning PCD-like polypeptides, it has now been found that various growth characteristics may be improved in plants by modulating expression in a plant of a nucleic acid encoding a PCD-like (Pterin-4-alpha-carbinolamine dehydratase-like) in a plant.

[0018] Concerning PRR2 polypeptides, it has now been found that various yield-related traits may be increased in plants relative to control plants, by increasing expression in a plant of a nucleic acid sequence encoding a pseudo response regulator type 2 (PRR2) polypeptide. The increased yield-related traits comprise one or more of: increased aboveground biomass, increased early vigor, earlier flowering, increased root biomass, increased plant height, increased seed yield per plant, increased number of filled seeds, increased total number of seeds, increased number of primary panicles, increased number of flowers per panicles, increased harvest index (HI), and increased Thousand Kernel Weight (TKW).

### BACKGROUND

### 1. basic-Helix-Loop-Helix Group 9 (bHLH9)

[0019] Transcription factors are usually defined as proteins that show sequence-specific DNA binding and that are capable of activating and/or repressing transcription. The basic/helix-loop-helix (bHLH) proteins are a superfamily of transcription factors that bind as dimers to specific DNA target sites and that have been well characterized in non-plant eukaryotes as important regulatory components in diverse biological processes. The distinguishing characteristic of the bHLH family is a bipartite domain consisting of approximately 60 amino acids. This bipartite domain comprises a DNA-binding basic region, which binds to a consensus hexanucleotide E-box and two α-helices separated by a variable loop region. The two α-helices promote dimerization, allowing the formation of homo- and heterodimers between different family members. While the bHLH domain is evolutionarily conserved, sequence similarity outside of the domain between members in different clades is lower.

[0020] The Arabidopsis genome codes for at least 1533 transcriptional regulators, which account for approximately 5.9% of its estimated total number of genes (Riechmann et al., 2000 (Science Vol. 290, 2105-2109)). Bailey et al., 2003 (The Plant Cell, Vol. 15, 2497-2501) report the total number of detected bHLH genes in Arabidopsis thaliana to be 162, making bHLH genes one of the largest families of transcription factors in Arabidopsis; the rice genome reportedly contains 131 bHLH genes (Buck and Atchley, 2003 (J. Mol. Evol. 56:742-750)). Heim et al., 2003 (Mol. Biol. Evol. 20(5):735-747) identified 12 subfamilies of bHLH genes in Arabidopsis thaliana based on structural similarities. Within each of these main groups, there are conserved amino acid sequence motifs outside the DNA binding domain. It has been suggested that structurally related genes belonging to the same group are likely to share similar functions (Heim et al. 2003).

[0021] Animal and plant bHLH proteins bind to the palindromic hexanucleotide sequence CANNTG (E-box motif), wherein N represents any nucleotide and/or the G-box motif: CACGTG. Patterns of amino acids were found at three positions within the basic region of the bHLH motif (the 5-9-13 configuration) that defined the bHLH subgroups (clades), with an H-E-R configuration as the ancestral sequence. The most frequent 5-9-13 amino acid configuration of bHLH proteins falling within group IX (bHLH9) of Heim et al. 2003 is R-E-R.

[0022] In plants, the biological function of a number of bHLH proteins from different groups has been reported. For example the proteins of group III, Arabidopsis gene AtbHLH042 (TT8: Transparant Testa 8) and its homologous from Zea mays, gene Intensifier I and Antohcyanin I from petunia hybrida, PhAN1, play a role in the synthesis of precursors of plant pigments such as flavonoids and anthocyanins (Heim et al. 2003) and three members of group XII have been linked to pathways regulating plant hormonal response (Friedrichsen et al 2002, Genetics 162: 1445-1456). Other functions played by bHLH proteins include phytochrome signaling, globulin expression, fruit dehiscence, carpel and epidermal development (Buck and Atchley, 2003 J Mol Evol. 2003; 56(6):742-50.). However no biological role has been assigned yet to any of the bHLH proteins of group IX of Heim et al. 2003.

### 2. Imbibition-Inducible 1 (IMB1)

[0023] The bromodomain, a conserved domain present in many chromatin-associated proteins and in most nuclear acetyltransferases, is known to function as an acetyl-lysine binding domain. The bromodomain is composed of four left-handed helix bundles (α_{Z}, α_{A}, α_{B}, and α_{C}), with a long loop (ZA) connecting helices Z and A oriented against the small loop (BC) connecting helices B and C. These loops are organized to form an accessible hydrophobic pocket in which the interaction with the acetylated lysine residue occurs (for a review, see Zheng and Zhou, FEBS Letters 513, 124-128, 2002; Loyola and Almouzni, Trends Cell Biol. 14, 279-281, 2004). NMR studies have shown that the acetyl-lysine binding site is localised between the ZA and BC loops in this hydrophobic pocket. The bromodomain thus allows protein-protein interactions that can be regulated by acetylation of lysine.

[0024] In yeast, bromodomain-proteins are known to play a role in chromatin remodelling. Other activities in which bromodomain-proteins are suggested to play a role include transcriptional activiation, memory of the transcriptionally activated chromosomal regions and anti-silencing. Little is known however about role of bromodomain protein on the phenotype of plants: Chua et al. (Genes & Development 19, 2245-2254, 2005) report that overexpression of the bromodomain-protein GTE6 gives elongated juvenile leaves in Arabidopsis. Lightner et al. (WO 2005/058021) described that overexpression of the bromodomain-protein At3g52280 resulted in increased seed oil content. IMB1 of Arabidopsis thaliana reportedly is induced during seed imbibition and is thought to regulate ABA- and phytochrome A-mediated responses of germination (Duque and Chua, Plant Journal 35, 787-799, 2003).

### 3. PCD-Like

[0025] Pterin-4a-carbinolamine dehydratases (PCDs) acts as an enzyme in intermediary metabolism playing a relevant role in for example the synthesis of amino acids. PCDs recycle oxidized pterin cofactors generated by aromatic amino acid hydroxylases (AAHs). PCD having a systematic nomenclature of (6R)-6-(L-erythro-1,2-dihydroxypropyl)-5,6,7,8-tetrahydro-4a-hydroxypterin hydro-lyase [(6R)-6-(L-erythro-1,2-dihydroxypropyl)-7,8-dihydro-6H-pterin-forming] catalyses the dehydration of 4a-hydroxytetrahydrobiopterins according to the reaction: (6R)-6-(L-erythro-1,2-dihydroxypropyl)-5,6,7,8-tetrahydro-4a-hydroxypterin=(6R)-6-(L-erythro-1,2-dihydroxypropyl)-7,8-dihydro-6H-pterin+H2O.

[0026] PCDs are known to be encoded in a wide variety of organism including animals, plants, and microbes. Pterin 4 alpha carbinolamine dehydratase is also known as PCD-like (dimerisation cofactor of hepatocyte nuclear factor 1-alpha, HNF-1). PCD-like is a bifunctional protein that function as 4a-hydroxytetrahydrobiopterin dehydratases and as coactivators of HNF1alpha-dependent transcription (Cronk et al. Protein Sci. 1996 October; 5(10):1963-72).

[0027] Pterin-4a-carbinolamine dehydratase activity of PCD proteins from plants and diverse microorganisms has been determined in vivo and in vitro which allowed the definition of a catalytic motif, [EDKHQN]-x(3)-H-[HN]-[PCS]-x(5,6)-[YWFH]-x(9)-[HW]-x(8,15)-D, that can be used as a signature for PCD activity (Naponelli et al. 2008. Plant Physiol. 2008; 146(4): 1515-1527).

[0028] Phylogenomic and functional analysis of plant PCDS, reportedly established that plants have two types of PCDs proteins. Type 1 is characterized by the presence of the catalytic motif as defined above, it has PCD activity, and is located in mitochondria. Type 2 is unique to plants, is localized in plastids, and apparently arose from type 1 early in plant evolution. Type 2 proteins have a characteristic subterminal domain that includes the motif [GE]-[DN]-[FL]-G-A-R-D-P-x(3)-E-x(4)-F-G-[DE]K and typically lack the catalytic motif. Reportedly, overexpressing the type 2 gene (At5g51110) in Arabidopsis thaliana had no apparent phenotypic effect, and its suppression by RNA interference resulted in a small reduction in leaf pigment content and a larger reduction in chloroplast number per mesophyll cell (Naponelli et al. 2008).

### 4. Pseudo Response Regulator Type 2 (PRR2)

[0029] Common signal transduction mechanisms, generally referred to as histidine-to-aspartate (His-to-Asp) phosphorelay systems, are involved in a wide variety of cellular responses to environmental and developmental stimuli many prokaryotes, fungi, slime molds, and plants. A His-to-Asp phosphorelay system consists of two or more common signal transducers: (1) a membrane-localized sensor exhibiting His-kinase activity (HK, that senses the output); (2) a response regulator (RR) transcription factor usually containing a phospho-accepting Asp in its receiver domain (that mediates the output); and (3) and optionally a His-containing phosphotransmitter (HP) (Hwang et al. (2002) Plant Phys 129: 500-515, and references therein).

[0030] The completion of the Arabidopsis genome sequence has revealed 54 genes encoding putative His kinase (AHK), His phosphotransfer (AHP), response regulator (ARR, type-A and type-B), and related proteins. Among these related proteins, is a set of unique genes encoding proteins very similar to, but clearly distinct from the ARR family of response regulators. Notably, these lack the phospho-accepting aspartate site that is invariantly conserved in the receiver domain of the classical response regulators (Makino et al. (2000) Plant Cell Physiol 41:791-803). The three invariant amino acid residues (D-D-K) in typical bacteria, yeast and plants RRsis not conserved: the phosphate-accepting Asp (D) of the receiver-like domain is replaced by Glu (E), Asn (N), or Gln (Q). However, despite significant sequence divergence, many APRRs have other Asp residues in the conserved motifs and could still act as the final outputs of two-component phosphorelay in plants. Therefore, these novel proteins are collectively designated as ‘Arabidopsis pseudo-response regulators (APRRs, APRR1 to APRR9)’, and pseudo-response regulators (PRR) in other plants.

[0031] The APRR polypeptides are further classified into two subgroups based in particular on their distinctive C-terminal domain: one is represented by APRR1 and the other by APRR2. Members of the APRR1 family of pseudo-response regulators contain a characteristic signature domain named the C-motif, and also found CONSTANS transcription factor polypeptides. The C motif (or CCT motif) is rich in basic amino acids (Arg and Lys) and contains a putative nuclear localization signal. In contrast, members belonging to the APRR2 family have another signature domain named the B-motif, which is common to the type-B family of classical response regulators (Imamura et al. (1999) Plant Cell Physiol 40: 733-742; representative of the plant single Myb-related domains, which belong to the GARP subfamily). This B-type motif is further found in Golden2-like (GLK2) transcription factor polypeptides in involved in photosynthetic development and plastid biogenesis.

[0032] APRR1 is identical to TOC1 (Strayer et al. (2000) Science 289: 768-771), and has been shown to be involved in phytochrome-mediated plant circadian regulation. APRR2 (also named TOC2), although also belonging to this family implicated in circadian rhythm regulation, is not itself regulated by light and its function has not yet been further characterized in higher plants.

[0033] In U.S. Pat. No. 7,193,129 “Stress-related polynucleotides and polypeptides in plants”, are described nucleic acid sequences encoding PRR2 polypeptides (SEQ ID NO: 25), and constructs comprising these. Transgenic plants overexpressing a PRR2 polypeptide with increased tolerance to nitrogen limiting conditions as compared to a wild-type plant of the same species, are shown.

### SUMMARY

### 1. basic-Helix-Loop-Helix Group 9 (bHLH9)

[0034] Surprisingly, it has now been found that modulating expression of a nucleic acid encoding a bHLH9 polypeptide gives plants having enhanced yield-related traits, in particular increased yield relative to control plants.

[0035] According one embodiment, there is provided a method for enhancing yield related traits of a plant relative to control plants, comprising modulating expression of a nucleic acid encoding a bHLH9 polypeptide in a plant.

### 2. Imbibition-Inducible 1 (IMB1)

[0036] Surprisingly, it has now been found that modulating expression of a nucleic acid encoding an IMB1 polypeptide gives plants having enhanced yield-related traits, in particular increased yield relative to control plants, with the proviso that increased yield does not comprise increased oil content of a plant.

[0037] According one embodiment, there is provided a method for improving yield related traits of a plant relative to control plants, comprising modulating expression of a nucleic acid encoding an IMB1 polypeptide in a plant.

### 3. PCD-Like

[0038] Surprisingly, it has now been found that modulating expression of a nucleic acid encoding a PCD-like polypeptide gives plants having enhanced yield-related traits relative to control plants.

[0039] According one embodiment, there is provided a method for enhancing yield related traits of a plant relative to control plants, comprising modulating expression of a nucleic acid encoding a PCD-like polypeptide in a plant.

### 4. Pseudo Response Regulator Type 2 (PRR2)

[0040] Surprisingly, it has now been found that increasing expression in a plant of a nucleic acid sequence encoding a PRR2 polypeptide as defined herein, gives plants having increased yield-related traits relative to control plants.

[0041] According to one embodiment, there is provided a method for increasing yield-related traits in plants relative to control plants, comprising increasing expression in a plant of a nucleic acid sequence encoding a PRR2 polypeptide as defined herein. The increased yield-related traits comprise one or more of: increased aboveground biomass, increased early vigor, earlier flowering, increased root biomass, increased plant height, increased seed yield per plant, increased number of filled seeds, increased total number of seeds, increased number of primary panicles, increased number of flowers per panicles, increased harvest index (HI), and increased Thousand Kernel Weight (TKW).

### DEFINITIONS

### Polypeptide(s)/Protein(s)

[0042] The terms “polypeptide” and “protein” are used interchangeably herein and refer to amino acids in a polymeric form of any length, linked together by peptide bonds.

### Polynucleotide(s)/Nucleic Acid(s)/Nucleic Acid Sequence(s)/Nucleotide Sequence(s)

[0043] The terms “polynucleotide(s)”, “nucleic acid sequence(s)”, “nucleotide sequence(s)”, “nucleic acid(s)”, “nucleic acid molecule” are used interchangeably herein and refer to nucleotides, either ribonucleotides or deoxyribonucleotides or a combination of both, in a polymeric unbranched form of any length.

### Control Plant(s)

[0044] The choice of suitable control plants is a routine part of an experimental setup and may include corresponding wild type plants or corresponding plants without the gene of interest. The control plant is typically of the same plant species or even of the same variety as the plant to be assessed. The control plant may also be a nullizygote of the plant to be assessed. Nullizygotes are individuals missing the transgene by segregation. A “control plant” as used herein refers not only to whole plants, but also to plant parts, including seeds and seed parts.

### Homologue(s)

[0045] “Homologues” of a protein encompass peptides, oligopeptides, polypeptides, proteins and enzymes having amino acid substitutions, deletions and/or insertions relative to the unmodified protein in question and having similar biological and functional activity as the unmodified protein from which they are derived.

[0046] A deletion refers to removal of one or more amino acids from a protein.

[0047] An insertion refers to one or more amino acid residues being introduced into a predetermined site in a protein. Insertions may comprise N-terminal and/or C-terminal fusions as well as intra-sequence insertions of single or multiple amino acids. Generally, insertions within the amino acid sequence will be smaller than N- or C-terminal fusions, of the order of about 1 to 10 residues. Examples of N- or C-terminal fusion proteins or peptides include the binding domain or activation domain of a transcriptional activator as used in the yeast two-hybrid system, phage coat proteins, (histidine)-6-tag, glutathione S-transferase-tag, protein A, maltose-binding protein, dihydrofolate reductase, Tag•100 epitope, c-myc epitope, FLAG®-epitope, lacZ, CMP (calmodulin-binding peptide), HA epitope, protein C epitope and VSV epitope.

[0048] A substitution refers to replacement of amino acids of the protein with other amino acids having similar properties (such as similar hydrophobicity, hydrophilicity, antigenicity, propensity to form or break α-helical structures or β-sheet structures). Amino acid substitutions are typically of single residues, but may be clustered depending upon functional constraints placed upon the polypeptide; insertions will usually be of the order of about 1 to 10 amino acid residues. The amino acid substitutions are preferably conservative amino acid substitutions. Conservative substitution tables are well known in the art (see for example Creighton (1984) Proteins. W.H. Freeman and Company (Eds) and Table 1 below).

TABLE 1
Examples of conserved amino acid substitutions

| Residue | Conservative Substitutions |
|---|---|
| Ala | Ser |
| Arg | Lys |
| Asn | Gln; His |
| Asp | Glu |
| Gln | Asn |
| Cys | Ser |
| Glu | Asp |
| Gly | Pro |
| His | Asn; Gln |
| Ile | Leu, Val |
| Leu | Ile; Val |
| Lys | Arg; Gln |
| Met | Leu; Ile |
| Phe | Met; Leu; Tyr |
| Ser | Thr; Gly |
| Thr | Ser; Val |
| Trp | Tyr |
| Tyr | Trp; Phe |
| Val | Ile; Leu |

[0049] Amino acid substitutions, deletions and/or insertions may readily be made using peptide synthetic techniques well known in the art, such as solid phase peptide synthesis and the like, or by recombinant DNA manipulation. Methods for the manipulation of DNA sequences to produce substitution, insertion or deletion variants of a protein are well known in the art. For example, techniques for making substitution mutations at predetermined sites in DNA are well known to those skilled in the art and include M13 mutagenesis, T7-Gen in vitro mutagenesis (USB, Cleveland, Ohio), QuickChange Site Directed mutagenesis (Stratagene, San Diego, Calif.), PCR-mediated site-directed mutagenesis or other site-directed mutagenesis protocols.

### Derivatives

[0050] “Derivatives” include peptides, oligopeptides, polypeptides which may, compared to the amino acid sequence of the naturally-occurring form of the protein, such as the protein of interest, comprise substitutions of amino acids with non-naturally occurring amino acid residues, or additions of non-naturally occurring amino acid residues. “Derivatives” of a protein also encompass peptides, oligopeptides, polypeptides which comprise naturally occurring altered (glycosylated, acylated, prenylated, phosphorylated, myristoylated, sulphated etc.) or non-naturally altered amino acid residues compared to the amino acid sequence of a naturally-occurring form of the polypeptide. A derivative may also comprise one or more non-amino acid substituents or additions compared to the amino acid sequence from which it is derived, for example a reporter molecule or other ligand, covalently or non-covalently bound to the amino acid sequence, such as a reporter molecule which is bound to facilitate its detection, and non-naturally occurring amino acid residues relative to the amino acid sequence of a naturally-occurring protein. Furthermore, “derivatives” also include fusions of the naturally-occurring form of the protein with tagging peptides such as FLAG, HIS6 or thioredoxin (for a review of tagging peptides, see Terpe, Appl. Microbiol. Biotechnol. 60, 523-533, 2003).

### Orthologue(s)/Paralogue(s)

[0051] Orthologues and paralogues encompass evolutionary concepts used to describe the ancestral relationships of genes. Paralogues are genes within the same species that have originated through duplication of an ancestral gene; orthologues are genes from different organisms that have originated through speciation, and are also derived from a common ancestral gene.

### Domain

[0052] The term “domain” refers to a set of amino acids conserved at specific positions along an alignment of sequences of evolutionarily related proteins. While amino acids at other positions can vary between homologues, amino acids that are highly conserved at specific positions indicate amino acids that are likely essential in the structure, stability or function of a protein. Identified by their high degree of conservation in aligned sequences of a family of protein homologues, they can be used as identifiers to determine if any polypeptide in question belongs to a previously identified polypeptide family.

### Motif/Consensus Sequence/Signature

[0053] The term “motif” or “consensus sequence” or “signature” refers to a short conserved region in the sequence of evolutionarily related proteins. Motifs are frequently highly conserved parts of domains, but may also include only part of the domain, or be located outside of conserved domain (if all of the amino acids of the motif fall outside of a defined domain).

### Hybridisation

[0054] The term “hybridisation” as defined herein is a process wherein substantially homologous complementary nucleotide sequences anneal to each other. The hybridisation process can occur entirely in solution, i.e. both complementary nucleic acids are in solution. The hybridisation process can also occur with one of the complementary nucleic acids immobilised to a matrix such as magnetic beads, Sepharose beads or any other resin. The hybridisation process can furthermore occur with one of the complementary nucleic acids immobilised to a solid support such as a nitro-cellulose or nylon membrane or immobilised by e.g. photolithography to, for example, a siliceous glass support (the latter known as nucleic acid arrays or microarrays or as nucleic acid chips). In order to allow hybridisation to occur, the nucleic acid molecules are generally thermally or chemically denatured to melt a double strand into two single strands and/or to remove hairpins or other secondary structures from single stranded nucleic acids.

[0055] The term “stringency” refers to the conditions under which a hybridisation takes place. The stringency of hybridisation is influenced by conditions such as temperature, salt concentration, ionic strength and hybridisation buffer composition. Generally, low stringency conditions are selected to be about 30° C. lower than the thermal melting point (Tₘ) for the specific sequence at a defined ionic strength and pH. Medium stringency conditions are when the temperature is 20° C. below Tₘ, and high stringency conditions are when the temperature is 10° C. below Tₘ. High stringency hybridisation conditions are typically used for isolating hybridising sequences that have high sequence similarity to the target nucleic acid sequence. However, nucleic acids may deviate in sequence and still encode a substantially identical polypeptide, due to the degeneracy of the genetic code. Therefore medium stringency hybridisation conditions may sometimes be needed to identify such nucleic acid molecules.

[0056] The Tm is the temperature under defined ionic strength and pH, at which 50% of the target sequence hybridises to a perfectly matched probe. The Tₘ, is dependent upon the solution conditions and the base composition and length of the probe. For example, longer sequences hybridise specifically at higher temperatures. The maximum rate of hybridisation is obtained from about 16° C. up to 32° C. below Tₘ. The presence of monovalent cations in the hybridisation solution reduce the electrostatic repulsion between the two nucleic acid strands thereby promoting hybrid formation; this effect is visible for sodium concentrations of up to 0.4M (for higher concentrations, this effect may be ignored). Formamide reduces the melting temperature of DNA-DNA and DNA-RNA duplexes with 0.6 to 0.7° C. for each percent formamide, and addition of 50% formamide allows hybridisation to be performed at 30 to 45° C., though the rate of hybridisation will be lowered. Base pair mismatches reduce the hybridisation rate and the thermal stability of the duplexes. On average and for large probes, the Tm decreases about 1° C. per % base mismatch. The Tm may be calculated using the following equations, depending on the types of hybrids:

1) DNA-DNA hybrids (Meinkoth and Wahl, Anal. Biochem., 138: 267-284, 1984):

Tₘ=81.5° C.+16.6×log₁₀ [Na⁺]^{a}+0.41×%[G/C^{b}]−500×[L^{c}]⁻¹−0.61×% formamide

2) DNA-RNA or RNA-RNA hybrids:

Tm=79.8+18.5(log₁₀ [Na⁺]^{a})+0.58(% G/C^{b})+11.8(% G/C^{b})²−820/L^{c}

3) oligo-DNA or oligo-RNAs hybrids:

For <20 nucleotides: Tₘ=2(lₙ)

For 20-35 nucleotides: Tₘ=22+1.46(lₙ)
[0057] ^{a}or for other monovalent cation, but only accurate in the 0.01-0.4 M range.
[0058] ^{b}only accurate for % GC in the 30% to 75% range.
[0059] ^{c}L=length of duplex in base pairs.
[0060] ^{d} oligo, oligonucleotide; Iₙ, =effective length of primer=2×(no. of G/C)+(no. of NT).

[0061] Non-specific binding may be controlled using any one of a number of known techniques such as, for example, blocking the membrane with protein containing solutions, additions of heterologous RNA, DNA, and SDS to the hybridisation buffer, and treatment with Rnase. For non-homologous probes, a series of hybridizations may be performed by varying one of (i) progressively lowering the annealing temperature (for example from 68° C. to 42° C.) or (ii) progressively lowering the formamide concentration (for example from 50% to 0%). The skilled artisan is aware of various parameters which may be altered during hybridisation and which will either maintain or change the stringency conditions.

[0062] Besides the hybridisation conditions, specificity of hybridisation typically also depends on the function of post-hybridisation washes. To remove background resulting from non-specific hybridisation, samples are washed with dilute salt solutions. Critical factors of such washes include the ionic strength and temperature of the final wash solution: the lower the salt concentration and the higher the wash temperature, the higher the stringency of the wash. Wash conditions are typically performed at or below hybridisation stringency. A positive hybridisation gives a signal that is at least twice of that of the background. Generally, suitable stringent conditions for nucleic acid hybridisation assays or gene amplification detection procedures are as set forth above. More or less stringent conditions may also be selected. The skilled artisan is aware of various parameters which may be altered during washing and which will either maintain or change the stringency conditions.

[0063] For example, typical high stringency hybridisation conditions for DNA hybrids longer than 50 nucleotides encompass hybridisation at 65° C. in 1×SSC or at 42° C. in 1×SSC and 50% formamide, followed by washing at 65° C. in 0.3×SSC. Examples of medium stringency hybridisation conditions for DNA hybrids longer than 50 nucleotides encompass hybridisation at 50° C. in 4×SSC or at 40° C. in 6×SSC and 50% formamide, followed by washing at 50° C. in 2×SSC. The length of the hybrid is the anticipated length for the hybridising nucleic acid. When nucleic acids of known sequence are hybridised, the hybrid length may be determined by aligning the sequences and identifying the conserved regions described herein. 1×SSC is 0.15M NaCl and 15 mM sodium citrate; the hybridisation solution and wash solutions may additionally include 5×Denhardt's reagent, 0.5-1.0% SDS, 100 μg/ml denatured, fragmented salmon sperm DNA, 0.5% sodium pyrophosphate.

[0064] For the purposes of defining the level of stringency, reference can be made to Sambrook et al. (2001) Molecular Cloning: a laboratory manual, 3^{rd} Edition, Cold Spring Harbor Laboratory Press, CSH, New York or to Current Protocols in Molecular Biology, John Wiley & Sons, N.Y. (1989 and yearly updates).

### Splice Variant

[0065] The term “splice variant” as used herein encompasses variants of a nucleic acid sequence in which selected introns and/or exons have been excised, replaced, displaced or added, or in which introns have been shortened or lengthened. Such variants will be ones in which the biological activity of the protein is substantially retained; this may be achieved by selectively retaining functional segments of the protein. Such splice variants may be found in nature or may be manmade. Methods for predicting and isolating such splice variants are well known in the art (see for example Foissac and Schiex (2005) BMC Bioinformatics 6: 25).

### Allelic Variant

[0066] Alleles or allelic variants are alternative forms of a given gene, located at the same chromosomal position. Allelic variants encompass Single Nucleotide Polymorphisms (SNPs), as well as Small Insertion/Deletion Polymorphisms (INDELs). The size of INDELs is usually less than 100 bp. SNPs and INDELs form the largest set of sequence variants in naturally occurring polymorphic strains of most organisms.

### Gene Shuffling/Directed Evolution

[0067] Gene shuffling or directed evolution consists of iterations of DNA shuffling followed by appropriate screening and/or selection to generate variants of nucleic acids or portions thereof encoding proteins having a modified biological activity (Castle et al., (2004) Science 304(5674): 1151-4; U.S. Pat. Nos. 5,811,238 and 6,395,547).

### Regulatory Element/Control Sequence/Promoter

[0068] The terms “regulatory element”, “control sequence” and “promoter” are all used interchangeably herein and are to be taken in a broad context to refer to regulatory nucleic acid sequences capable of effecting expression of the sequences to which they are ligated. The term “promoter” typically refers to a nucleic acid control sequence located upstream from the transcriptional start of a gene and which is involved in recognising and binding of RNA polymerase and other proteins, thereby directing transcription of an operably linked nucleic acid. Encompassed by the aforementioned terms are transcriptional regulatory sequences derived from a classical eukaryotic genomic gene (including the TATA box which is required for accurate transcription initiation, with or without a CCAAT box sequence) and additional regulatory elements (i.e. upstream activating sequences, enhancers and silencers) which alter gene expression in response to developmental and/or external stimuli, or in a tissue-specific manner. Also included within the term is a transcriptional regulatory sequence of a classical prokaryotic gene, in which case it may include a −35 box sequence and/or −10 box transcriptional regulatory sequences. The term “regulatory element” also encompasses a synthetic fusion molecule or derivative that confers, activates or enhances expression of a nucleic acid molecule in a cell, tissue or organ.

[0069] A “plant promoter” comprises regulatory elements, which mediate the expression of a coding sequence segment in plant cells. Accordingly, a plant promoter need not be of plant origin, but may originate from viruses or micro-organisms, for example from viruses which attack plant cells. The “plant promoter” can also originate from a plant cell, e.g. from the plant which is transformed with the nucleic acid sequence to be expressed in the inventive process and described herein. This also applies to other “plant” regulatory signals, such as “plant” terminators. The promoters upstream of the nucleotide sequences useful in the methods of the present invention can be modified by one or more nucleotide substitution(s), insertion(s) and/or deletion(s) without interfering with the functionality or activity of either the promoters, the open reading frame (ORF) or the 3′-regulatory region such as terminators or other 3′ regulatory regions which are located away from the ORF. It is furthermore possible that the activity of the promoters is increased by modification of their sequence, or that they are replaced completely by more active promoters, even promoters from heterologous organisms. For expression in plants, the nucleic acid molecule must, as described above, be linked operably to or comprise a suitable promoter which expresses the gene at the right point in time and with the required spatial expression pattern.

[0070] For the identification of functionally equivalent promoters, the promoter strength and/or expression pattern of a candidate promoter may be analysed for example by operably linking the promoter to a reporter gene and assaying the expression level and pattern of the reporter gene in various tissues of the plant. Suitable well-known reporter genes include for example beta-glucuronidase or beta-galactosidase. The promoter activity is assayed by measuring the enzymatic activity of the beta-glucuronidase or beta-galactosidase. The promoter strength and/or expression pattern may then be compared to that of a reference promoter (such as the one used in the methods of the present invention). Alternatively, promoter strength may be assayed by quantifying mRNA levels or by comparing mRNA levels of the nucleic acid used in the methods of the present invention, with mRNA levels of housekeeping genes such as 18S rRNA, using methods known in the art, such as Northern blotting with densitometric analysis of autoradiograms, quantitative real-time PCR or RT-PCR (Heid et al., 1996 Genome Methods 6: 986-994). Generally by “weak promoter” is intended a promoter that drives expression of a coding sequence at a low level. By “low level” is intended at levels of about 1/10,000 transcripts to about 1/100,000 transcripts, to about 1/500,0000 transcripts per cell. Conversely, a “strong promoter” drives expression of a coding sequence at high level, or at about 1/10 transcripts to about 1/100 transcripts to about 1/1000 transcripts per cell. Generally, by “medium strength promoter” is intended a promoter that drives expression of a coding sequence at a lower level than a strong promoter, in particular at a level that is in all instances below that obtained when under the control of a 35S CaMV promoter.

### Operably Linked

[0071] The term “operably linked” as used herein refers to a functional linkage between the promoter sequence and the gene of interest, such that the promoter sequence is able to initiate transcription of the gene of interest.

### Constitutive Promoter

[0072] A “constitutive promoter” refers to a promoter that is transcriptionally active during most, but not necessarily all, phases of growth and development and under most environmental conditions, in at least one cell, tissue or organ. Table 2a below gives examples of constitutive promoters.

TABLE 2a
Examples of constitutive promoters

| Gene Source | Reference |
|---|---|
| Actin | McElroy et al, Plant Cell, 2: 163-171, 1990 |
| HMGP | WO 2004/070039 |
| CAMV 35S | Odell et al, Nature, 313: 810-812, 1985 |
| CaMV 19S | Nilsson et al., Physiol. Plant. 100: 456-462, 1997 |
| GOS2 | de Pater et al, Plant J Nov; 2(6): 837-44, 1992, WO 2004/065596 |
| Ubiquitin | Christensen et al, Plant Mol. Biol. 18: 675-689, 1992 |
| Rice cyclophilin | Buchholz et al, Plant Mol Biol. 25(5): 837-43, 1994 |
| Maize H3 histone | Lepetit et al, Mol. Gen. Genet. 231: 276-285, 1992 |
| Alfalfa H3 histone | Wu et al. Plant Mol. Biol. 11: 641-649, 1988 |
| Actin 2 | An et al, Plant J. 10(1); 107-121, 1996 |
| 34S FMV | Sanger et al., Plant. Mol. Biol., 14, 1990: 433-443 |
| Rubisco small subunit | U.S. Pat. No. 4,962,028 |
| OCS | Leisner (1988) Proc Natl Acad Sci USA 85(5): 2553 |
| SAD1 | Jain et al., Crop Science, 39 (6), 1999: 1696 |
| SAD2 | Jain et al., Crop Science, 39 (6), 1999: 1696 |
| nos | Shaw et al. (1984) Nucleic Acids Res. 12(20): 7831-7846 |
| V-ATPase | WO 01/14572 |
| Super promoter | WO 95/14098 |
| G-box proteins | WO 94/12015 |

### Ubiquitous Promoter

[0073] A ubiquitous promoter is active in substantially all tissues or cells of an organism.

### Developmentally-Regulated Promoter

[0074] A developmentally-regulated promoter is active during certain developmental stages or in parts of the plant that undergo developmental changes.

### Inducible Promoter

[0075] An inducible promoter has induced or increased transcription initiation in response to a chemical (for a review see Gatz 1997, Annu. Rev. Plant Physiol. Plant Mol. Biol., 48:89-108), environmental or physical stimulus, or may be “stress-inducible”, i.e. activated when a plant is exposed to various stress conditions, or a “pathogen-inducible” i.e. activated when a plant is exposed to exposure to various pathogens.

### Organ-Specific/Tissue-Specific Promoter

[0076] An organ-specific or tissue-specific promoter is one that is capable of preferentially initiating transcription in certain organs or tissues, such as the leaves, roots, seed tissue etc. For example, a “root-specific promoter” is a promoter that is transcriptionally active predominantly in plant roots, substantially to the exclusion of any other parts of a plant, whilst still allowing for any leaky expression in these other plant parts. Promoters able to initiate transcription in certain cells only are referred to herein as “cell-specific”.

[0077] Examples of root-specific promoters are listed in Table 2b below:

TABLE 2b
Examples of root-specific promoters

| Gene Source | Reference |
|---|---|
| RCc3 | Plant Mol Biol. 1995 Jan; 27(2): 237-48 |
| Arabidopsis PHT1 | Kovama et al., 2005; Mudge et al. (2002, Plant J. |
| | 31: 341) |
| Medicago phosphate | Xiao et al., 2006 |
| transporter | |
| Arabidopsis Pyk10 | Nitz et al. (2001) Plant Sci 161(2): 337-346 |
| root-expressible genes | Tingey et al., EMBO J. 6: 1, 1987. |
| tobacco auxin-inducible gene | Van der Zaal et al., Plant Mol. Biol. 16, 983, 1991. |
| β-tubulin | Oppenheimer, et al., Gene 63: 87, 1988. |
| tobacco root-specific genes | Conkling, et al., Plant Physiol. 93: 1203, 1990. |
| B. napus G1-3b gene | U.S. Pat. No. 5,401,836 |
| SbPRP1 | Suzuki et al., Plant Mol. Biol. 21: 109-119, 1993. |
| LRX1 | Baumberger et al. 2001, Genes & Dev. 15: 1128 |
| BTG-26 Brassica napus | US 20050044585 |
| LeAMT1 (tomato) | Lauter et al. (1996, PNAS 3: 8139) |
| The LeNRT1-1 (tomato) | Lauter et al. (1996, PNAS 3: 8139) |
| class I patatin gene (potato) | Liu et al., Plant Mol. Biol. 153: 386-395, 1991. |
| KDC1 (Daucus carota) | Downey et al. (2000, J. Biol. Chem. 275: 39420) |
| TobRB7 gene | W Song (1997) PhD Thesis, North Carolina State |
| | University, Raleigh, NC USA |
| OsRAB5a (rice) | Wang et al. 2002, Plant Sci. 163: 273 |
| ALF5 (Arabidopsis) | Diener et al. (2001, Plant Cell 13: 1625) |
| NRT2; 1Np (N. plumbaginifolia) | Quesada et al. (1997, Plant Mol. Biol. 34: 265) |

[0078] A seed-specific promoter is transcriptionally active predominantly in seed tissue, but not necessarily exclusively in seed tissue (in cases of leaky expression). The seed-specific promoter may be active during seed development and/or during germination. The seed specific promoter may be endosperm/aleurone/embryo specific. Examples of seed-specific promoters (endosperm/aleurone/embryo specific) are shown in Table 2c to Table 2f below. Further examples of seed-specific promoters are given in Qing Qu and Takaiwa (Plant Biotechnol. J. 2, 113-125, 2004), which disclosure is incorporated by reference herein as if fully set forth.

TABLE 2c
Examples of seed-specific promoters

| Gene source | Reference |
|---|---|
| seed-specific genes | Simon et al., Plant Mol. Biol. 5: 191, 1985; |
| | Scofield et al., J. Biol. Chem. 262: 12202, 1987; |
| | Baszczynski et al., Plant Mol. Biol. 14: 633, 1990. |
| Brazil Nut albumin | Pearson et al., Plant Mol. Biol. 18: 235-245, 1992. |
| legumin | Ellis et al., Plant Mol. Biol. 10: 203-214, 1988. |
| glutelin (rice) | Takaiwa et al., Mol. Gen. Genet. 208: 15-22, 1986; |
| | Takaiwa et al., FEBS Letts. 221: 43-47, 1987. |
| zein | Matzke et al Plant Mol Biol, 14(3): 323-32 1990 |
| napA | Stalberg et al, Planta 199: 515-519, 1996. |
| wheat LMW and HMW | Mol Gen Genet 216: 81-90, 1989; NAR 17: 461-2, 1989 |
| glutenin-1 | |
| wheat SPA | Albani et al, Plant Cell, 9: 171-184, 1997 |
| wheat α, β, γ-gliadins | EMBO J. 3: 1409-15, 1984 |
| barley Itr1 promoter | Diaz et al. (1995) Mol Gen Genet 248(5): 592-8 |
| barley B1, C, D, hordein | Theor Appl Gen 98: 1253-62, 1999; Plant J 4: 343-55, |
| | 1993; Mol Gen Genet 250: 750-60, 1996 |
| barley DOF | Mena et al, The Plant Journal, 116(1): 53-62, 1998 |
| blz2 | EP99106056.7 |
| synthetic promoter | Vicente-Carbajosa et al., Plant J. 13: 629-640, 1998. |
| rice prolamin NRP33 | Wu et al, Plant Cell Physiology 39(8) 885-889, 1998 |
| rice a-globulin Glb-1 | Wu et al, Plant Cell Physiology 39(8) 885-889, 1998 |
| rice OSH1 | Sato et al, Proc. Natl. Acad. Sci. USA, 93: 8117-8122, |
| | 1996 |
| rice α-globulin REB/OHP-1 | Nakase et al. Plant Mol. Biol. 33: 513-522, 1997 |
| rice ADP-glucose pyrophosphorylase | Trans Res 6: 157-68, 1997 |
| maize ESR gene family | Plant J 12: 235-46, 1997 |
| sorghum α-kafirin | DeRose et al., Plant Mol. Biol 32: 1029-35, 1996 |
| KNOX | Postma-Haarsma et al, Plant Mol. Biol. 39: 257-71, 1999 |
| rice oleosin | Wu et al, J. Biochem. 123: 386, 1998 |
| sunflower oleosin | Cummins et al., Plant Mol. Biol. 19: 873-876, 1992 |
| PRO0117, putative rice 40S | WO 2004/070039 |
| ribosomal protein | |
| PRO0136, rice alanine | unpublished |
| aminotransferase | |
| PRO0147, trypsin inhibitor | unpublished |
| ITR1 (barley) | |
| PRO0151, rice WSI18 | WO 2004/070039 |
| PRO0175, rice RAB21 | WO 2004/070039 |
| PRO005 | WO 2004/070039 |
| PRO0095 | WO 2004/070039 |
| α-amylase (Amy32b) | Lanahan et al, Plant Cell 4: 203-211, 1992; Skriver et al, |
| | Proc Natl Acad Sci USA 88: 7266-7270, 1991 |
| cathepsin β-like gene | Cejudo et al, Plant Mol Biol 20: 849-856, 1992 |
| Barley Ltp2 | Kalla et al., Plant J. 6: 849-60, 1994 |
| Chi26 | Leah et al., Plant J. 4: 579-89, 1994 |
| Maize B-Peru | Selinger et al., Genetics 149; 1125-38, 1998 |

TABLE 2d
examples of endosperm-specific promoters

| Gene source | Reference |
|---|---|
| glutelin (rice) | Takaiwa et al. (1986) Mol Gen Genet 208: 15-22; |
| | Takaiwa et al. (1987) FEBS Letts. 221: 43-47 |
| zein | Matzke et al., (1990) Plant Mol Biol 14(3): 323-32 |
| wheat LMW and HMW glutenin-1 | Colot et al. (1989) Mol Gen Genet 216: 81-90, |
| | Anderson et al. (1989) NAR 17: 461-2 |
| wheat SPA | Albani et al. (1997) Plant Cell 9: 171-184 |
| wheat gliadins | Rafalski et al. (1984) EMBO 3: 1409-15 |
| barley Itr1 promoter | Diaz et al. (1995) Mol Gen Genet 248(5): 592-8 |
| barley B1, C, D, hordein | Cho et al. (1999) Theor Appl Genet 98: 1253-62; |
| | Muller et al. (1993) Plant J 4: 343-55; |
| | Sorenson et al. (1996) Mol Gen Genet 250: 750-60 |
| barley DOF | Mena et al, (1998) Plant J 116(1): 53-62 |
| blz2 | Onate et al. (1999) J Biol Chem 274(14): 9175-82 |
| synthetic promoter | Vicente-Carbajosa et al. (1998) Plant J 13: 629-640 |
| rice prolamin NRP33 | Wu et al, (1998) Plant Cell Physiol 39(8) 885-889 |
| rice globulin Glb-1 | Wu et al. (1998) Plant Cell Physiol 39(8) 885-889 |
| rice globulin REB/OHP-1 | Nakase et al. (1997) Plant Molec Biol 33: 513-522 |
| rice ADP-glucose pyrophosphorylase | Russell et al. (1997) Trans Res 6: 157-68 |
| maize ESR gene family | Opsahl-Ferstad et al. (1997) Plant J 12: 235-46 |
| sorghum kafirin | DeRose et al. (1996) Plant Mol Biol 32: 1029-35 |

TABLE 2e

| Gene source | Reference |
|---|---|
| rice OSH1 | Sato et al, Proc. Natl. Acad. Sci. USA, 93: 8117-8122, |
| | 1996 |
| KNOX | Postma-Haarsma et al, Plant Mol. Biol. 39: 257-71, 1999 |
| PRO0151 | WO 2004/070039 |
| PRO0175 | WO 2004/070039 |
| PRO005 | WO 2004/070039 |
| PRO0095 | WO 2004/070039 |

TABLE 2f
Examples of aleurone-specific promoters:

| Gene source | Reference |
|---|---|
| α-amylase (Amy32b) | Lanahan et al, Plant Cell 4: 203-211, 1992; |
| | Skriver et al, Proc Natl Acad Sci USA 88: |
| | 7266-7270, 1991 |
| cathepsin β-like gene | Cejudo et al, Plant Mol Biol 20: 849-856, 1992 |
| Barley Ltp2 | Kalla et al., Plant J. 6: 849-60, 1994 |
| Chi26 | Leah et al., Plant J. 4: 579-89, 1994 |
| Maize B-Peru | Selinger et al., Genetics 149; 1125-38, 1998 |

[0079] A green tissue-specific promoter as defined herein is a promoter that is transcriptionally active predominantly in green tissue, substantially to the exclusion of any other parts of a plant, whilst still allowing for any leaky expression in these other plant parts.

[0080] Examples of green tissue-specific promoters which may be used to perform the methods of the invention are shown in Table 2g below.

TABLE 2g
Examples of green tissue-specific promoters

| Gene | Expression | Reference |
|---|---|---|
| Maize Orthophosphate dikinase | Leaf specific | Fukavama et al., 2001 |
| Maize Phosphoenolpyruvate | Leaf specific | Kausch et al., 2001 |
| carboxylase | | |
| Rice Phosphoenolpyruvate | Leaf specific | Liu et al., 2003 |
| carboxylase | | |
| Rice small subunit Rubisco | Leaf specific | Nomura et al., 2000 |
| rice beta expansin EXBP9 | Shoot specific | WO 2004/070039 |
| Pigeonpea small subunit Rubisco | Leaf specific | Panguluri et al., 2005 |
| Pea RBCS3A | Leaf specific | |

[0081] Another example of a tissue-specific promoter is a meristem-specific promoter, which is transcriptionally active predominantly in meristematic tissue, substantially to the exclusion of any other parts of a plant, whilst still allowing for any leaky expression in these other plant parts. Examples of green meristem-specific promoters which may be used to perform the methods of the invention are shown in Table 2h below.

TABLE 2h
Examples of meristem-specific promoters

| Gene source | Expression pattern | Reference |
|---|---|---|
| rice OSH1 | Shoot apical meristem, | Sato et al. (1996) Proc. |
| | from embryo globular | Natl. Acad. Sci. |
| | stage to seedling | USA, 93: 8117-8122 |
| | stage | |
| Rice metallothionein | Meristem specific | BAD87835.1 |
| WAK1 & WAK 2 | Shoot and root apical | Wagner & Kohorn (2001) |
| | meristems, and in | Plant Cell 13(2): 303-318 |
| | expanding leaves and | |
| | sepals | |

### Terminator

[0082] The term “terminator” encompasses a control sequence which is a DNA sequence at the end of a transcriptional unit which signals 3′ processing and polyadenylation of a primary transcript and termination of transcription. The terminator can be derived from the natural gene, from a variety of other plant genes, or from T-DNA. The terminator to be added may be derived from, for example, the nopaline synthase or octopine synthase genes, or alternatively from another plant gene, or less preferably from any other eukaryotic gene.

### Modulation

[0083] The term “modulation” means in relation to expression or gene expression, a process in which the expression level is changed by said gene expression in comparison to the control plant, the expression level may be increased or decreased. The original, unmodulated expression may be of any kind of expression of a structural RNA (rRNA, tRNA) or mRNA with subsequent translation. The term “modulating the activity” shall mean any change of the expression of the inventive nucleic acid sequences or encoded proteins, which leads to increased yield and/or increased growth of the plants.

### Expression

[0084] The term “expression” or “gene expression” means the transcription of a specific gene or specific genes or specific genetic construct. The term “expression” or “gene expression” in particular means the transcription of a gene or genes or genetic construct into structural RNA (rRNA, tRNA) or mRNA with or without subsequent translation of the latter into a protein. The process includes transcription of DNA and processing of the resulting mRNA product.

### Increased Expression/Overexpression

[0085] The term “increased expression” or “overexpression” as used herein means any form of expression that is additional to the original wild-type expression level.

[0086] Methods for increasing expression of genes or gene products are well documented in the art and include, for example, overexpression driven by appropriate promoters, the use of transcription enhancers or translation enhancers. Isolated nucleic acids which serve as promoter or enhancer elements may be introduced in an appropriate position (typically upstream) of a non-heterologous form of a polynucleotide so as to upregulate expression of a nucleic acid encoding the polypeptide of interest. For example, endogenous promoters may be altered in vivo by mutation, deletion, and/or substitution (see, Kmiec, U.S. Pat. No. 5,565,350; Zarling et al., WO9322443), or isolated promoters may be introduced into a plant cell in the proper orientation and distance from a gene of the present invention so as to control the expression of the gene.

[0087] If polypeptide expression is desired, it is generally desirable to include a polyadenylation region at the 3′-end of a polynucleotide coding region. The polyadenylation region can be derived from the natural gene, from a variety of other plant genes, or from T-DNA. The 3′ end sequence to be added may be derived from, for example, the nopaline synthase or octopine synthase genes, or alternatively from another plant gene, or less preferably from any other eukaryotic gene.

[0088] An intron sequence may also be added to the 5′ untranslated region (UTR) or the coding sequence of the partial coding sequence to increase the amount of the mature message that accumulates in the cytosol. Inclusion of a spliceable intron in the transcription unit in both plant and animal expression constructs has been shown to increase gene expression at both the mRNA and protein levels up to 1000-fold (Buchman and Berg (1988) Mol. Cell biol. 8: 4395-4405; Callis et al. (1987) Genes Dev 1:1183-1200). Such intron enhancement of gene expression is typically greatest when placed near the 5′ end of the transcription unit. Use of the maize introns Adh1-S intron 1, 2, and 6, the Bronze-1 intron are known in the art. For general information see: The Maize Handbook, Chapter 116, Freeling and Walbot, Eds., Springer, N.Y. (1994).

### Endogenous Gene

[0089] Reference herein to an “endogenous” gene not only refers to the gene in question as found in a plant in its natural form (i.e., without there being any human intervention), but also refers to that same gene (or a substantially homologous nucleic acid/gene) in an isolated form subsequently (re)introduced into a plant (a transgene). For example, a transgenic plant containing such a transgene may encounter a substantial reduction of the transgene expression and/or substantial reduction of expression of the endogenous gene. The isolated gene may be isolated from an organism or may be manmade, for example by chemical synthesis.

### Decreased Expression

[0090] Reference herein to “decreased expression” or “reduction or substantial elimination” of expression is taken to mean a decrease in endogenous gene expression and/or polypeptide levels and/or polypeptide activity relative to control plants. The reduction or substantial elimination is in increasing order of preference at least 10%, 20%, 30%, 40% or 50%, 60%, 70%, 80%, 85%, 90%, or 95%, 96%, 97%, 98%, 99% or more reduced compared to that of control plants. Methods for decreasing expression are known in the art and the skilled person would readily be able to adapt the known methods for silencing so as to achieve reduction of expression of an endogenous gene in a whole plant or in parts thereof through the use of an appropriate promoter, for example.

[0091] For the reduction or substantial elimination of expression an endogenous gene in a plant, a sufficient length of substantially contiguous nucleotides of a nucleic acid sequence is required. In order to perform gene silencing, this may be as little as 20, 19, 18, 17, 16, 15, 14, 13, 12, 11, 10 or fewer nucleotides, alternatively this may be as much as the entire gene (including the 5′ and/or 3′ UTR, either in part or in whole). The stretch of substantially contiguous nucleotides may be derived from the nucleic acid encoding the protein of interest (target gene), or from any nucleic acid capable of encoding an orthologue, paralogue or homologue of the protein of interest. Preferably, the stretch of substantially contiguous nucleotides is capable of forming hydrogen bonds with the target gene (either sense or antisense strand), more preferably, the stretch of substantially contiguous nucleotides has, in increasing order of preference, 50%, 60%, 70%, 80%, 85%, 90%, 95%, 96%, 97%, 98%, 99%, 100% sequence identity to the target gene (either sense or antisense strand). A nucleic acid sequence encoding a (functional) polypeptide is not a requirement for the various methods discussed herein for the reduction or substantial elimination of expression of an endogenous gene.

[0092] Examples of various methods for the reduction or substantial elimination of expression in a plant of an endogenous gene, or for lowering levels and/or activity of a protein, are known to the skilled in the art. A skilled person would readily be able to adapt the known methods for silencing, so as to achieve reduction of expression of an endogenous gene in a whole plant or in parts thereof through the use of an appropriate promoter, for example.

[0093] This reduction or substantial elimination of expression may be achieved using routine tools and techniques. A preferred method for the reduction or substantial elimination of endogenous gene expression is by introducing and expressing in a plant a genetic construct into which the nucleic acid (in this case a stretch of substantially contiguous nucleotides derived from the gene of interest, or from any nucleic acid capable of encoding an orthologue, paralogue or homologue of any one of the protein of interest) is cloned as an inverted repeat (in part or completely), separated by a spacer (non-coding DNA).

[0094] In such a preferred method, expression of the endogenous gene is reduced or substantially eliminated through RNA-mediated silencing using an inverted repeat of a nucleic acid or a part thereof (in this case a stretch of substantially contiguous nucleotides derived from the gene of interest, or from any nucleic acid capable of encoding an orthologue, paralogue or homologue of the protein of interest), preferably capable of forming a hairpin structure. The inverted repeat is cloned in an expression vector comprising control sequences. A non-coding DNA nucleic acid sequence (a spacer, for example a matrix attachment region fragment (MAR), an intron, a polylinker, etc.) is located between the two inverted nucleic acids forming the inverted repeat. After transcription of the inverted repeat, a chimeric RNA with a self-complementary structure is formed (partial or complete). This double-stranded RNA structure is referred to as the hairpin RNA (hpRNA). The hpRNA is processed by the plant into siRNAs that are incorporated into an RNA-induced silencing complex (RISC). The RISC further cleaves the mRNA transcripts, thereby substantially reducing the number of mRNA transcripts to be translated into polypeptides. For further general details see for example, Grierson et al. (1998) WO 98/53083; Waterhouse et al. (1999) WO 99/53050).

[0095] Performance of the methods of the invention does not rely on introducing and expressing in a plant a genetic construct into which the nucleic acid is cloned as an inverted repeat, but any one or more of several well-known “gene silencing” methods may be used to achieve the same effects.

[0096] One such method for the reduction of endogenous gene expression is RNA-mediated silencing of gene expression (downregulation). Silencing in this case is triggered in a plant by a double stranded RNA sequence (dsRNA) that is substantially similar to the target endogenous gene. This dsRNA is further processed by the plant into about 20 to about 26 nucleotides called short interfering RNAs (siRNAs). The siRNAs are incorporated into an RNA-induced silencing complex (RISC) that cleaves the mRNA transcript of the endogenous target gene, thereby substantially reducing the number of mRNA transcripts to be translated into a polypeptide. Preferably, the double stranded RNA sequence corresponds to a target gene.

[0097] Another example of an RNA silencing method involves the introduction of nucleic acid sequences or parts thereof (in this case a stretch of substantially contiguous nucleotides derived from the gene of interest, or from any nucleic acid capable of encoding an orthologue, paralogue or homologue of the protein of interest) in a sense orientation into a plant. “Sense orientation” refers to a DNA sequence that is homologous to an mRNA transcript thereof. Introduced into a plant would therefore be at least one copy of the nucleic acid sequence. The additional nucleic acid sequence will reduce expression of the endogenous gene, giving rise to a phenomenon known as co-suppression. The reduction of gene expression will be more pronounced if several additional copies of a nucleic acid sequence are introduced into the plant, as there is a positive correlation between high transcript levels and the triggering of co-suppression.

[0098] Another example of an RNA silencing method involves the use of antisense nucleic acid sequences. An “antisense” nucleic acid sequence comprises a nucleotide sequence that is complementary to a “sense” nucleic acid sequence encoding a protein, i.e. complementary to the coding strand of a double-stranded cDNA molecule or complementary to an mRNA transcript sequence. The antisense nucleic acid sequence is preferably complementary to the endogenous gene to be silenced. The complementarity may be located in the “coding region” and/or in the “non-coding region” of a gene. The term “coding region” refers to a region of the nucleotide sequence comprising codons that are translated into amino acid residues. The term “non-coding region” refers to 5′ and 3′ sequences that flank the coding region that are transcribed but not translated into amino acids (also referred to as 5′ and 3′ untranslated regions).

[0099] Antisense nucleic acid sequences can be designed according to the rules of Watson and Crick base pairing. The antisense nucleic acid sequence may be complementary to the entire nucleic acid sequence (in this case a stretch of substantially contiguous nucleotides derived from the gene of interest, or from any nucleic acid capable of encoding an orthologue, paralogue or homologue of the protein of interest), but may also be an oligonucleotide that is antisense to only a part of the nucleic acid sequence (including the mRNA 5′ and 3′ UTR). For example, the antisense oligonucleotide sequence may be complementary to the region surrounding the translation start site of an mRNA transcript encoding a polypeptide. The length of a suitable antisense oligonucleotide sequence is known in the art and may start from about 50, 45, 40, 35, 30, 25, 20, 15 or 10 nucleotides in length or less. An antisense nucleic acid sequence according to the invention may be constructed using chemical synthesis and enzymatic ligation reactions using methods known in the art. For example, an antisense nucleic acid sequence (e.g., an antisense oligonucleotide sequence) may be chemically synthesized using naturally occurring nucleotides or variously modified nucleotides designed to increase the biological stability of the molecules or to increase the physical stability of the duplex formed between the antisense and sense nucleic acid sequences, e.g., phosphorothioate derivatives and acridine substituted nucleotides may be used. Examples of modified nucleotides that may be used to generate the antisense nucleic acid sequences are well known in the art. Known nucleotide modifications include methylation, cyclization and ‘caps’ and substitution of one or more of the naturally occurring nucleotides with an analogue such as inosine. Other modifications of nucleotides are well known in the art.

[0100] The antisense nucleic acid sequence can be produced biologically using an expression vector into which a nucleic acid sequence has been subcloned in an antisense orientation (i.e., RNA transcribed from the inserted nucleic acid will be of an antisense orientation to a target nucleic acid of interest). Preferably, production of antisense nucleic acid sequences in plants occurs by means of a stably integrated nucleic acid construct comprising a promoter, an operably linked antisense oligonucleotide, and a terminator.

[0101] The nucleic acid molecules used for silencing in the methods of the invention (whether introduced into a plant or generated in situ) hybridize with or bind to mRNA transcripts and/or genomic DNA encoding a polypeptide to thereby inhibit expression of the protein, e.g., by inhibiting transcription and/or translation. The hybridization can be by conventional nucleotide complementarity to form a stable duplex, or, for example, in the case of an antisense nucleic acid sequence which binds to DNA duplexes, through specific interactions in the major groove of the double helix. Antisense nucleic acid sequences may be introduced into a plant by transformation or direct injection at a specific tissue site. Alternatively, antisense nucleic acid sequences can be modified to target selected cells and then administered systemically. For example, for systemic administration, antisense nucleic acid sequences can be modified such that they specifically bind to receptors or antigens expressed on a selected cell surface, e.g., by linking the antisense nucleic acid sequence to peptides or antibodies which bind to cell surface receptors or antigens. The antisense nucleic acid sequences can also be delivered to cells using the vectors described herein.

[0102] According to a further aspect, the antisense nucleic acid sequence is an a-anomeric nucleic acid sequence. An a-anomeric nucleic acid sequence forms specific double-stranded hybrids with complementary RNA in which, contrary to the usual b-units, the strands run parallel to each other (Gaultier et al. (1987) Nucl Ac Res 15: 6625-6641). The antisense nucleic acid sequence may also comprise a 2′-o-methylribonucleotide (Inoue et al. (1987) Nucl Ac Res 15, 6131-6148) or a chimeric RNA-DNA analogue (Inoue et al. (1987) FEBS Lett. 215, 327-330).

[0103] The reduction or substantial elimination of endogenous gene expression may also be performed using ribozymes. Ribozymes are catalytic RNA molecules with ribonuclease activity that are capable of cleaving a single-stranded nucleic acid sequence, such as an mRNA, to which they have a complementary region. Thus, ribozymes (e.g., hammerhead ribozymes (described in Haselhoff and Gerlach (1988) Nature 334, 585-591) can be used to catalytically cleave mRNA transcripts encoding a polypeptide, thereby substantially reducing the number of mRNA transcripts to be translated into a polypeptide. A ribozyme having specificity for a nucleic acid sequence can be designed (see for example: Cech et al. U.S. Pat. No. 4,987,071; and Cech et al. U.S. Pat. No. 5,116,742). Alternatively, mRNA transcripts corresponding to a nucleic acid sequence can be used to select a catalytic RNA having a specific ribonuclease activity from a pool of RNA molecules (Bartel and Szostak (1993) Science 261, 1411-1418). The use of ribozymes for gene silencing in plants is known in the art (e.g., Atkins et al. (1994) WO 94/00012; Lenne et al. (1995) WO 95/03404; Lutziger et al. (2000) WO 00/00619; Prinsen et al. (1997) WO 97/13865 and Scott et al. (1997) WO 97/38116).

[0104] Gene silencing may also be achieved by insertion mutagenesis (for example, T-DNA insertion or transposon insertion) or by strategies as described by, among others, Angell and Baulcombe ((1999) Plant J 20(3): 357-62), (Amplicon VIGS WO 98/36083), or Baulcombe (WO 99/15682).

[0105] Gene silencing may also occur if there is a mutation on an endogenous gene and/or a mutation on an isolated gene/nucleic acid subsequently introduced into a plant. The reduction or substantial elimination may be caused by a non-functional polypeptide. For example, the polypeptide may bind to various interacting proteins; one or more mutation(s) and/or truncation(s) may therefore provide for a polypeptide that is still able to bind interacting proteins (such as receptor proteins) but that cannot exhibit its normal function (such as signalling ligand).

[0106] A further approach to gene silencing is by targeting nucleic acid sequences complementary to the regulatory region of the gene (e.g., the promoter and/or enhancers) to form triple helical structures that prevent transcription of the gene in target cells. See Helene, C., Anticancer Drug Res. 6, 569-84, 1991; Helene et al., Ann. N.Y. Acad. Sci. 660, 27-36 1992; and Maher, L. J. Bioassays 14, 807-15, 1992.

[0107] Other methods, such as the use of antibodies directed to an endogenous polypeptide for inhibiting its function in planta, or interference in the signalling pathway in which a polypeptide is involved, will be well known to the skilled man. In particular, it can be envisaged that manmade molecules may be useful for inhibiting the biological function of a target polypeptide, or for interfering with the signalling pathway in which the target polypeptide is involved.

[0108] Alternatively, a screening program may be set up to identify in a plant population natural variants of a gene, which variants encode polypeptides with reduced activity. Such natural variants may also be used for example, to perform homologous recombination.

[0109] Artificial and/or natural microRNAs (miRNAs) may be used to knock out gene expression and/or mRNA translation. Endogenous miRNAs are single stranded small RNAs of typically 19-24 nucleotides long. They function primarily to regulate gene expression and/or mRNA translation. Most plant microRNAs (miRNAs) have perfect or near-perfect complementarity with their target sequences. However, there are natural targets with up to five mismatches. They are processed from longer non-coding RNAs with characteristic fold-back structures by double-strand specific RNases of the Dicer family. Upon processing, they are incorporated in the RNA-induced silencing complex (RISC) by binding to its main component, an Argonaute protein. mRNAs serve as the specificity components of RISC, since they base-pair to target nucleic acids, mostly mRNAs, in the cytoplasm. Subsequent regulatory events include target mRNA cleavage and destruction and/or translational inhibition. Effects of miRNA overexpression are thus often reflected in decreased mRNA levels of target genes.

[0110] Artificial microRNAs (amiRNAs), which are typically 21 nucleotides in length, can be genetically engineered specifically to negatively regulate gene expression of single or multiple genes of interest. Determinants of plant microRNA target selection are well known in the art. Empirical parameters for target recognition have been defined and can be used to aid in the design of specific amiRNAs, (Schwab et al., Dev. Cell 8, 517-527, 2005). Convenient tools for design and generation of amiRNAs and their precursors are also available to the public (Schwab et al., Plant Cell 18, 1121-1133, 2006).

[0111] For optimal performance, the gene silencing techniques used for reducing expression in a plant of an endogenous gene requires the use of nucleic acid sequences from monocotyledonous plants for transformation of monocotyledonous plants, and from dicotyledonous plants for transformation of dicotyledonous plants. Preferably, a nucleic acid sequence from any given plant species is introduced into that same species. For example, a nucleic acid sequence from rice is transformed into a rice plant. However, it is not an absolute requirement that the nucleic acid sequence to be introduced originates from the same plant species as the plant in which it will be introduced. It is sufficient that there is substantial homology between the endogenous target gene and the nucleic acid to be introduced.

[0112] Described above are examples of various methods for the reduction or substantial elimination of expression in a plant of an endogenous gene. A person skilled in the art would readily be able to adapt the aforementioned methods for silencing so as to achieve reduction of expression of an endogenous gene in a whole plant or in parts thereof through the use of an appropriate promoter, for example.

### Selectable Marker (Gene)/Reporter Gene

[0113] “Selectable marker”, “selectable marker gene” or “reporter gene” includes any gene that confers a phenotype on a cell in which it is expressed to facilitate the identification and/or selection of cells that are transfected or transformed with a nucleic acid construct of the invention. These marker genes enable the identification of a successful transfer of the nucleic acid molecules via a series of different principles. Suitable markers may be selected from markers that confer antibiotic or herbicide resistance, that introduce a new metabolic trait or that allow visual selection. Examples of selectable marker genes include genes conferring resistance to antibiotics (such as nptII that phosphorylates neomycin and kanamycin, or hpt, phosphorylating hygromycin, or genes conferring resistance to, for example, bleomycin, streptomycin, tetracyclin, chloramphenicol, ampicillin, gentamycin, geneticin (G418), spectinomycin or blasticidin), to herbicides (for example bar which provides resistance to Basta®; aroA or gox providing resistance against glyphosate, or the genes conferring resistance to, for example, imidazolinone, phosphinothricin or sulfonylurea), or genes that provide a metabolic trait (such as manA that allows plants to use mannose as sole carbon source or xylose isomerase for the utilisation of xylose, or antinutritive markers such as the resistance to 2-deoxyglucose). Expression of visual marker genes results in the formation of colour (for example β-glucuronidase, GUS or β-galactosidase with its coloured substrates, for example X-Gal), luminescence (such as the luciferin/luceferase system) or fluorescence (Green Fluorescent Protein, GFP, and derivatives thereof). This list represents only a small number of possible markers. The skilled worker is familiar with such markers. Different markers are preferred, depending on the organism and the selection method.

[0114] It is known that upon stable or transient integration of nucleic acids into plant cells, only a minority of the cells takes up the foreign DNA and, if desired, integrates it into its genome, depending on the expression vector used and the transfection technique used. To identify and select these integrants, a gene coding for a selectable marker (such as the ones described above) is usually introduced into the host cells together with the gene of interest. These markers can for example be used in mutants in which these genes are not functional by, for example, deletion by conventional methods. Furthermore, nucleic acid molecules encoding a selectable marker can be introduced into a host cell on the same vector that comprises the sequence encoding the polypeptides of the invention or used in the methods of the invention, or else in a separate vector. Cells which have been stably transfected with the introduced nucleic acid can be identified for example by selection (for example, cells which have integrated the selectable marker survive whereas the other cells die). The marker genes may be removed or excised from the transgenic cell once they are no longer needed. Techniques for marker gene removal are known in the art, useful techniques are described above in the definitions section.

[0115] Since the marker genes, particularly genes for resistance to antibiotics and herbicides, are no longer required or are undesired in the transgenic host cell once the nucleic acids have been introduced successfully, the process according to the invention for introducing the nucleic acids advantageously employs techniques which enable the removal or excision of these marker genes. One such a method is what is known as co-transformation. The co-transformation method employs two vectors simultaneously for the transformation, one vector bearing the nucleic acid according to the invention and a second bearing the marker gene(s). A large proportion of transformants receives or, in the case of plants, comprises (up to 40% or more of the transformants), both vectors. In case of transformation with Agrobacteria, the transformants usually receive only a part of the vector, i.e. the sequence flanked by the T-DNA, which usually represents the expression cassette. The marker genes can subsequently be removed from the transformed plant by performing crosses. In another method, marker genes integrated into a transposon are used for the transformation together with desired nucleic acid (known as the Ac/Ds technology). The transformants can be crossed with a transposase source or the transformants are transformed with a nucleic acid construct conferring expression of a transposase, transiently or stable. In some cases (approx. 10%), the transposon jumps out of the genome of the host cell once transformation has taken place successfully and is lost. In a further number of cases, the transposon jumps to a different location. In these cases the marker gene must be eliminated by performing crosses. In microbiology, techniques were developed which make possible, or facilitate, the detection of such events. A further advantageous method relies on what is known as recombination systems; whose advantage is that elimination by crossing can be dispensed with. The best-known system of this type is what is known as the Cre/Iox system. Cre1 is a recombinase that removes the sequences located between the IoxP sequences. If the marker gene is integrated between the IoxP sequences, it is removed once transformation has taken place successfully, by expression of the recombinase. Further recombination systems are the HIN/HIX, FLP/FRT and REP/STB system (Tribble et al., J. Biol. Chem., 275, 2000: 22255-22267; Velmurugan et al., J. Cell Biol., 149, 2000: 553-566). A site-specific integration into the plant genome of the nucleic acid sequences according to the invention is possible. Naturally, these methods can also be applied to microorganisms such as yeast, fungi or bacteria.

### Transgenic/Transgene/Recombinant

[0116] For the purposes of the invention, “transgenic”, “transgene” or “recombinant” means with regard to, for example, a nucleic acid sequence, an expression cassette, gene construct or a vector comprising the nucleic acid sequence or an organism transformed with the nucleic acid sequences, expression cassettes or vectors according to the invention, all those constructions brought about by recombinant methods in which either
[0117] (a) the nucleic acid sequences encoding proteins useful in the methods of the invention, or
[0118] (b) genetic control sequence(s) which is operably linked with the nucleic acid sequence according to the invention, for example a promoter, or
[0119] (c) a) and b)
   are not located in their natural genetic environment or have been modified by recombinant methods, it being possible for the modification to take the form of, for example, a substitution, addition, deletion, inversion or insertion of one or more nucleotide residues. The natural genetic environment is understood as meaning the natural genomic or chromosomal locus in the original plant or the presence in a genomic library. In the case of a genomic library, the natural genetic environment of the nucleic acid sequence is preferably retained, at least in part. The environment flanks the nucleic acid sequence at least on one side and has a sequence length of at least 50 bp, preferably at least 500 bp, especially preferably at least 1000 bp, most preferably at least 5000 bp. A naturally occurring expression cassette—for example the naturally occurring combination of the natural promoter of the nucleic acid sequences with the corresponding nucleic acid sequence encoding a polypeptide useful in the methods of the present invention, as defined above—becomes a transgenic expression cassette when this expression cassette is modified by non-natural, synthetic (“artificial”) methods such as, for example, mutagenic treatment. Suitable methods are described, for example, in U.S. Pat. No. 5,565,350 or WO 00/15815.

[0120] A transgenic plant for the purposes of the invention is thus understood as meaning, as above, that the nucleic acids used in the method of the invention are not at their natural locus in the genome of said plant, it being possible for the nucleic acids to be expressed homologously or heterologously. However, as mentioned, transgenic also means that, while the nucleic acids according to the invention or used in the inventive method are at their natural position in the genome of a plant, the sequence has been modified with regard to the natural sequence, and/or that the regulatory sequences of the natural sequences have been modified. Transgenic is preferably understood as meaning the expression of the nucleic acids according to the invention at an unnatural locus in the genome, i.e. homologous or, preferably, heterologous expression of the nucleic acids takes place. Preferred transgenic plants are mentioned herein.

### Transformation

[0121] The term “introduction” or “transformation” as referred to herein encompasses the transfer of an exogenous polynucleotide into a host cell, irrespective of the method used for transfer. Plant tissue capable of subsequent clonal propagation, whether by organogenesis or embryogenesis, may be transformed with a genetic construct of the present invention and a whole plant regenerated there from. The particular tissue chosen will vary depending on the clonal propagation systems available for, and best suited to, the particular species being transformed. Exemplary tissue targets include leaf disks, pollen, embryos, cotyledons, hypocotyls, megagametophytes, callus tissue, existing meristematic tissue (e.g., apical meristem, axillary buds, and root meristems), and induced meristem tissue (e.g., cotyledon meristem and hypocotyl meristem). The polynucleotide may be transiently or stably introduced into a host cell and may be maintained non-integrated, for example, as a plasmid. Alternatively, it may be integrated into the host genome. The resulting transformed plant cell may then be used to regenerate a transformed plant in a manner known to persons skilled in the art.

[0122] The transfer of foreign genes into the genome of a plant is called transformation. Transformation of plant species is now a fairly routine technique. Advantageously, any of several transformation methods may be used to introduce the gene of interest into a suitable ancestor cell. The methods described for the transformation and regeneration of plants from plant tissues or plant cells may be utilized for transient or for stable transformation. Transformation methods include the use of liposomes, electroporation, chemicals that increase free DNA uptake, injection of the DNA directly into the plant, particle gun bombardment, transformation using viruses or pollen and microprojection. Methods may be selected from the calcium/polyethylene glycol method for protoplasts (Krens, F. A. et al., (1982) Nature 296, 72-74; Negrutiu I et al. (1987) Plant Mol Biol 8: 363-373); electroporation of protoplasts (Shillito R. D. et al. (1985) Bio/Technol 3, 1099-1102); microinjection into plant material (Crossway A et al., (1986) Mol. Gen Genet 202: 179-185); DNA or RNA-coated particle bombardment (Klein T M et al., (1987) Nature 327: 70) infection with (non-integrative) viruses and the like. Transgenic plants, including transgenic crop plants, are preferably produced via Agrobacterium-mediated transformation. An advantageous transformation method is the transformation in planta. To this end, it is possible, for example, to allow the agrobacteria to act on plant seeds or to inoculate the plant meristem with agrobacteria. It has proved particularly expedient in accordance with the invention to allow a suspension of transformed agrobacteria to act on the intact plant or at least on the flower primordia. The plant is subsequently grown on until the seeds of the treated plant are obtained (Clough and Bent, Plant J. (1998) 16, 735-743). Methods for Agrobacterium-mediated transformation of rice include well known methods for rice transformation, such as those described in any of the following: European patent application EP 1198985 A1, Aldemita and Hodges (Planta 199: 612-617, 1996); Chan et al. (Plant Mol Biol 22 (3): 491-506, 1993), Hiei et al. (Plant J 6 (2): 271-282, 1994), which disclosures are incorporated by reference herein as if fully set forth. In the case of corn transformation, the preferred method is as described in either Ishida et al. (Nat. Biotechnol 14(6): 745-50, 1996) or Frame et al. (Plant Physiol 129(1): 13-22, 2002), which disclosures are incorporated by reference herein as if fully set forth. Said methods are further described by way of example in B. Jenes et al., Techniques for Gene Transfer, in: Transgenic Plants, Vol. 1, Engineering and Utilization, eds. S. D. Kung and R. Wu, Academic Press (1993) 128-143 and in Potrykus Annu. Rev. Plant Physiol. Plant Molec. Biol. 42 (1991) 205-225). The nucleic acids or the construct to be expressed is preferably cloned into a vector, which is suitable for transforming Agrobacterium tumefaciens, for example pBin19 (Bevan et al., Nucl. Acids Res. 12 (1984) 8711). Agrobacteria transformed by such a vector can then be used in known manner for the transformation of plants, such as plants used as a model, like Arabidopsis (Arabidopsis thaliana is within the scope of the present invention not considered as a crop plant), or crop plants such as, by way of example, tobacco plants, for example by immersing bruised leaves or chopped leaves in an agrobacterial solution and then culturing them in suitable media. The transformation of plants by means of Agrobacterium tumefaciens is described, for example, by Hofgen and Willmitzer in Nucl. Acid Res. (1988) 16, 9877 or is known inter alia from F. F. White, Vectors for Gene Transfer in Higher Plants; in Transgenic Plants, Vol. 1, Engineering and Utilization, eds. S. D. Kung and R. Wu, Academic Press, 1993, pp. 15-38.

[0123] In addition to the transformation of somatic cells, which then have to be regenerated into intact plants, it is also possible to transform the cells of plant meristems and in particular those cells which develop into gametes. In this case, the transformed gametes follow the natural plant development, giving rise to transgenic plants. Thus, for example, seeds of Arabidopsis are treated with agrobacteria and seeds are obtained from the developing plants of which a certain proportion is transformed and thus transgenic [Feldman, K A and Marks M D (1987). Mol Gen Genet 208:274-289; Feldmann K (1992). In: C Koncz, N-H Chua and J Shell, eds, Methods in Arabidopsis Research. Word Scientific, Singapore, pp. 274-289]. Alternative methods are based on the repeated removal of the inflorescences and incubation of the excision site in the center of the rosette with transformed agrobacteria, whereby transformed seeds can likewise be obtained at a later point in time (Chang (1994). Plant J. 5: 551-558; Katavic (1994). Mol Gen Genet, 245: 363-370). However, an especially effective method is the vacuum infiltration method with its modifications such as the “floral dip” method. In the case of vacuum infiltration of Arabidopsis, intact plants under reduced pressure are treated with an agrobacterial suspension [Bechthold, N (1993). C R Acad Sci Paris Life Sci, 316: 1194-1199], while in the case of the “floral dip” method the developing floral tissue is incubated briefly with a surfactant-treated agrobacterial suspension [Clough, S J and Bent A F (1998) The Plant J. 16, 735-743]. A certain proportion of transgenic seeds are harvested in both cases, and these seeds can be distinguished from non-transgenic seeds by growing under the above-described selective conditions. In addition the stable transformation of plastids is of advantages because plastids are inherited maternally is most crops reducing or eliminating the risk of transgene flow through pollen. The transformation of the chloroplast genome is generally achieved by a process which has been schematically displayed in Klaus et al., 2004 [Nature Biotechnology 22 (2), 225-229]. Briefly the sequences to be transformed are cloned together with a selectable marker gene between flanking sequences homologous to the chloroplast genome. These homologous flanking sequences direct site specific integration into the plastome. Plastidal transformation has been described for many different plant species and an overview is given in Bock (2001) Transgenic plastids in basic research and plant biotechnology. J Mol Biol. 2001 Sep. 21; 312 (3):425-38 or Maliga, P (2003) Progress towards commercialization of plastid transformation technology. Trends Biotechnol. 21, 20-28. Further biotechnological progress has recently been reported in form of marker free plastid transformants, which can be produced by a transient co-integrated maker gene (Klaus et al., 2004, Nature Biotechnology 22(2), 225-229).

### T-DNA Activation Tagging

[0124] T-DNA activation tagging (Hayashi et al. Science (1992) 1350-1353), involves insertion of T-DNA, usually containing a promoter (may also be a translation enhancer or an intron), in the genomic region of the gene of interest or 10 kb up- or downstream of the coding region of a gene in a configuration such that the promoter directs expression of the targeted gene. Typically, regulation of expression of the targeted gene by its natural promoter is disrupted and the gene falls under the control of the newly introduced promoter. The promoter is typically embedded in a T-DNA. This T-DNA is randomly inserted into the plant genome, for example, through Agrobacterium infection and leads to modified expression of genes near the inserted T-DNA. The resulting transgenic plants show dominant phenotypes due to modified expression of genes close to the introduced promoter.

[0125] TILLING

[0126] The term “TILLING” is an abbreviation of “Targeted Induced Local Lesions In Genomes” and refers to a mutagenesis technology useful to generate and/or identify nucleic acids encoding proteins with modified expression and/or activity. TILLING also allows selection of plants carrying such mutant variants. These mutant variants may exhibit modified expression, either in strength or in location or in timing (if the mutations affect the promoter for example). These mutant variants may exhibit higher activity than that exhibited by the gene in its natural form. TILLING combines high-density mutagenesis with high-throughput screening methods. The steps typically followed in TILLING are: (a) EMS mutagenesis (Redei G P and Koncz C (1992) In Methods in Arabidopsis Research, Koncz C, Chua N H, Schell J, eds. Singapore, World Scientific Publishing Co, pp. 16-82; Feldmann et al., (1994) In Meyerowitz E M, Somerville C R, eds, Arabidopsis. Cold Spring Harbor Laboratory Press, Cold Spring Harbor, N.Y., pp 137-172; Lightner J and Caspar T (1998) In J Martinez-Zapater, J Salinas, eds, Methods on Molecular Biology, Vol. 82. Humana Press, Totowa, N. J., pp 91-104); (b) DNA preparation and pooling of individuals; (c) PCR amplification of a region of interest; (d) denaturation and annealing to allow formation of heteroduplexes; (e) DHPLC, where the presence of a heteroduplex in a pool is detected as an extra peak in the chromatogram; (f) identification of the mutant individual; and (g) sequencing of the mutant PCR product. Methods for TILLING are well known in the art (McCallum et al., (2000) Nat Biotechnol 18: 455-457; reviewed by Stemple (2004) Nat Rev Genet 5(2): 145-50).

### Homologous Recombination

[0127] Homologous recombination allows introduction in a genome of a selected nucleic acid at a defined selected position. Homologous recombination is a standard technology used routinely in biological sciences for lower organisms such as yeast or the moss Physcomitrella. Methods for performing homologous recombination in plants have been described not only for model plants (Offring a et al. (1990) EMBO J 9(10): 3077-84) but also for crop plants, for example rice (Terada et al. (2002) Nat Biotech 20(10): 1030-4; lida and Terada (2004) Curr Opin Biotech 15(2): 132-8), and approaches exist that are generally applicable regardless of the target organism (Miller et al, Nature Biotechnol. 25, 778-785, 2007).

### Yield

[0128] The term “yield” in general means a measurable produce of economic value, typically related to a specified crop, to an area, and to a period of time. Individual plant parts directly contribute to yield based on their number, size and/or weight, or the actual yield is the yield per square meter for a crop and year, which is determined by dividing total production (includes both harvested and appraised production) by planted square meters. The term “yield” of a plant may relate to vegetative biomass (root and/or shoot biomass), to reproductive organs, and/or to propagules (such as seeds) of that plant.

### Early Vigour

[0129] “Early vigour” refers to active healthy well-balanced growth especially during early stages of plant growth, and may result from increased plant fitness due to, for example, the plants being better adapted to their environment (i.e. optimizing the use of energy resources and partitioning between shoot and root). Plants having early vigour also show increased seedling survival and a better establishment of the crop, which often results in highly uniform fields (with the crop growing in uniform manner, i.e. with the majority of plants reaching the various stages of development at substantially the same time), and often better and higher yield. Therefore, early vigour may be determined by measuring various factors, such as thousand kernel weight, percentage germination, percentage emergence, seedling growth, seedling height, root length, root and shoot biomass and many more.

### Increase/Improve/Enhance

[0130] The terms “increase”, “improve” or “enhance” are interchangeable and shall mean in the sense of the application at least a 3%, 4%, 5%, 6%, 7%, 8%, 9% or 10%, preferably at least 15% or 20%, more preferably 25%, 30%, 35% or 40% more yield and/or growth in comparison to control plants as defined herein.

### Seed Yield

[0131] Increased seed yield may manifest itself as one or more of the following: a) an increase in seed biomass (total seed weight) which may be on an individual seed basis and/or per plant and/or per square meter; b) increased number of flowers per plant; c) increased number of (filled) seeds; d) increased seed filling rate (which is expressed as the ratio between the number of filled seeds divided by the total number of seeds); e) increased harvest index, which is expressed as a ratio of the yield of harvestable parts, such as seeds, divided by the total biomass; and f) increased thousand kernel weight (TKW), and g) increased number of primary panicles, which is extrapolated from the number of filled seeds counted and their total weight. An increased TKW may result from an increased seed size and/or seed weight, and may also result from an increase in embryo and/or endosperm size.

[0132] An increase in seed yield may also be manifested as an increase in seed size and/or seed volume. Furthermore, an increase in seed yield may also manifest itself as an increase in seed area and/or seed length and/or seed width and/or seed perimeter. Increased seed yield may also result in modified architecture, or may occur because of modified architecture.

### Greenness Index

[0133] The “greenness index” as used herein is calculated from digital images of plants. For each pixel belonging to the plant object on the image, the ratio of the green value versus the red value (in the RGB model for encoding color) is calculated. The greenness index is expressed as the percentage of pixels for which the green-to-red ratio exceeds a given threshold. Under normal growth conditions, under salt stress growth conditions, and under reduced nutrient availability growth conditions, the greenness index of plants is measured in the last imaging before flowering. In contrast, under drought stress growth conditions, the greenness index of plants is measured in the first imaging after drought.

### Plant

[0134] The term “plant” as used herein encompasses whole plants, ancestors and progeny of the plants and plant parts, including seeds, shoots, stems, leaves, roots (including tubers), flowers, and tissues and organs, wherein each of the aforementioned comprise the gene/nucleic acid of interest. The term “plant” also encompasses plant cells, suspension cultures, callus tissue, embryos, meristematic regions, gametophytes, sporophytes, pollen and microspores, again wherein each of the aforementioned comprises the gene/nucleic acid of interest.

[0135] Plants that are particularly useful in the methods of the invention include all plants which belong to the superfamily Viridiplantae, in particular monocotyledonous and dicotyledonous plants including fodder or forage legumes, ornamental plants, food crops, trees or shrubs selected from the list comprising Acer spp., Actinidia spp., Abelmoschus spp., Agave sisalana, Agropyron spp., Agrostis stolonifera, Allium spp., Amaranthus spp., Ammophila arenaria, Ananas comosus, Annona spp., Apium graveolens, Arachis spp, Artocarpus spp., Asparagus officinalis, Avena spp. (e.g. Avena sativa, Avena fatua, Avena byzantina, Avena fatua var. sativa, Avena hybrida), Averrhoa carambola, Bambusa sp., Benincasa hispida, Bertholletia excelsea, Beta vulgaris, Brassica spp. (e.g. Brassica napus, Brassica rapa ssp. [canola, oilseed rape, turnip rape]), Cadaba farinosa, Camellia sinensis, Canna indica, Cannabis sativa, Capsicum spp., Carex elata, Carica papaya, Carissa macrocarpa, Carya spp., Carthamus tinctorius, Castanea spp., Ceiba pentandra, Cichorium endivia, Cinnamomum spp., Citrullus lanatus, Citrus spp., Cocos spp., Coffea spp., Colocasia esculenta, Cola spp., Corchorus sp., Coriandrum sativum, Corylus spp., Crataegus spp., Crocus sativus, Cucurbita spp., Cucumis spp., Cynara spp., Daucus carota, Desmodium spp., Dimocarpus longan, Dioscorea spp., Diospyros spp., Echinochloa spp., Elaeis (e.g. Elaeis guineensis, Elaeis oleifera), Eleusine coracana, Eragrostis tef, Erianthus sp., Eriobotrya japonica, Eucalyptus sp., Eugenia uniflora, Fagopyrum spp., Fagus spp., Festuca arundinacea, Ficus carica, Fortunella spp., Fragaria spp., Ginkgo biloba, Glycine spp. (e.g. Glycine max, Soja hispida or Soja max), Gossypium hirsutum, Helianthus spp. (e.g. Helianthus annuus), Hemerocallis fulva, Hibiscus spp., Hordeum spp. (e.g. Hordeum vulgare), Ipomoea batatas, Juglans spp., Lactuca sativa, Lathyrus spp., Lens culinaris, Linum usitatissimum, Litchi chinensis, Lotus spp., Luffa acutangula, Lupinus spp., Luzula sylvatica, Lycopersicon spp. (e.g. Lycopersicon esculentum, Lycopersicon lycopersicum, Lycopersicon pyriforme), Macrotyloma spp., Malus spp., Malpighia emarginata, Mammea americana, Mangifera indica, Manihot spp., Manilkara zapota, Medicago sativa, Melilotus spp., Mentha spp., Miscanthus sinensis, Momordica spp., Morus nigra, Musa spp., Nicotiana spp., Olea spp., Opuntia spp., Ornithopus spp., Oryza spp. (e.g. Oryza sativa, Oryza latifolia), Panicum miliaceum, Panicum virgatum, Passiflora edulis, Pastinaca sativa, Pennisetum sp., Persea spp., Petroselinum crispum, Phalaris arundinacea, Phaseolus spp., Phleum pratense, Phoenix spp., Phragmites australis, Physalis spp., Pinus spp., Pistacia vera, Pisum spp., Poa spp., Populus spp., Prosopis spp., Prunus spp., Psidium spp., Punica granatum, Pyrus communis, Quercus spp., Raphanus sativus, Rheum rhabarbarum, Ribes spp., Ricinus communis, Rubus spp., Saccharum spp., Salix sp., Sambucus spp., Secale cereale, Sesamum spp., Sinapis sp., Solanum spp. (e.g. Solanum tuberosum, Solanum integrifolium or Solanum lycopersicum), Sorghum bicolor, Spinacia spp., Syzygium spp., Tagetes spp., Tamarindus indica, Theobroma cacao, Trifolium spp., Tripsacum dactyloides, Triticale sp., Triticosecale rimpaui, Triticum spp. (e.g. Triticum aestivum, Triticum durum, Triticum turgidum, Triticum hybernum, Triticum macha, Triticum sativum, Triticum monococcum or Triticum vulgare), Tropaeolum minus, Tropaeolum majus, Vaccinium spp., Vicia spp., Vigna spp., Viola odorata, Vitis spp., Zea mays, Zizania palustris, Ziziphus spp., amongst others.

### DETAILED DESCRIPTION OF THE INVENTION

[0136] Surprisingly, it has now been found that modulating expression in a plant of a nucleic acid encoding a bHLH9 polypeptide gives plants having enhanced yield-related traits relative to control plants. According to a first embodiment, the present invention provides a method for enhancing yield-related traits in plants relative to control plants, comprising modulating expression in a plant of a nucleic acid encoding a bHLH9 polypeptide.

[0137] Furthermore, surprisingly, it has now been found that modulating expression in a plant of a nucleic acid encoding an IMB1 polypeptide gives plants having enhanced yield-related traits relative to control plants. According to a first embodiment, the present invention provides a method for enhancing yield-related traits in plants relative to control plants, comprising modulating expression in a plant of a nucleic acid encoding an IMB1 polypeptide.

[0138] Even furthermore, surprisingly, it has now been found that modulating expression in a plant of a nucleic acid encoding a PCD-like polypeptide gives plants having enhanced yield-related traits relative to control plants. According to a first embodiment, the present invention provides a method for enhancing yield-related traits in plants relative to control plants, comprising modulating expression in a plant of a nucleic acid encoding a PCD-like polypeptide and optionally selecting for plants having enhanced yield-related traits.

[0139] Yet furthermore, surprisingly, it has now been found that increasing expression in a plant of a nucleic acid sequence encoding a PRR2 polypeptide as defined herein, gives plants having increased yield-related traits relative to control plants. According to a first embodiment, the present invention provides a method for increasing yield-related traits in plants relative to control plants, comprising increasing expression in a plant of a nucleic acid sequence encoding a PRR2 polypeptide.

[0140] The invention also provides hitherto unknown nucleic acid sequences encoding PRR2 polypeptides, and PRR2 polypeptides.

[0141] According to one embodiment of the present invention, there is therefore provided an isolated nucleic acid molecule selected from:
[0142] (i) a nucleic acid sequence as represented by SEQ ID NO: 459;
[0143] (ii) the complement of a nucleic acid sequence as represented by SEQ ID NO: 459;
[0144] (iii) a nucleic acid sequence encoding a PRR2 polypeptide having, in increasing order of preference, at least 50%, 55%, 60%, 65%, 70%, 75%, 80%, 85%, 90%, 95%, 96%, 97%, 98%, 99% or more amino acid sequence identity to the polypeptide sequence represented by SEQ ID NO: 460.

[0145] According to a further embodiment of the present invention, there is also provided an isolated polypeptide selected from:
[0146] (i) a polypeptide sequence as represented by SEQ ID NO: 460;
[0147] (ii) a polypeptide sequence having, in increasing order of preference, at least 50%, 55%, 60%, 65%, 70%, 75%, 80%, 85%, 90%, 95%, 96%, 97%, 98%, 99% or more amino acid sequence identity to a polypeptide sequence as represented by SEQ ID NO: 460;
[0148] (iii) derivatives of any of the polypeptide sequences given in (i) or (ii) above.

[0149] Concerning bHLH9 polypeptides, a preferred method for modulating (preferably, increasing) expression of a nucleic acid encoding a bHLH9 polypeptide is by introducing and expressing in a plant a nucleic acid encoding a bHLH9 polypeptide.

[0150] Concerning IMB1 polypeptides, a preferred method for modulating (preferably, increasing) expression of a nucleic acid encoding an IMB1 polypeptide is by introducing and expressing in a plant a nucleic acid encoding an IMB1 polypeptide.

[0151] Concerning PCD-like polypeptides, a preferred method for modulating (preferably, increasing) expression of a nucleic acid encoding a PCD-like polypeptide is by introducing and expressing in a plant a nucleic acid encoding a PCD-like polypeptide.

[0152] Concerning PRR2 polypeptides, a preferred method for increasing expression in a plant of a nucleic acid sequence encoding a PRR2 polypeptide is by introducing and expressing in a plant a nucleic acid sequence encoding a PRR2 polypeptide.

[0153] Concerning bHLH9 polypeptides, any reference hereinafter to a “protein useful in the methods of the invention” is taken to mean a bHLH9 polypeptide as defined herein. Any reference hereinafter to a “nucleic acid useful in the methods of the invention” is taken to mean a nucleic acid capable of encoding such a bHLH9 polypeptide. The nucleic acid to be introduced into a plant (and therefore useful in performing the methods of the invention) is any nucleic acid encoding the type of protein which will now be described, hereafter also named “bHLH9 nucleic acid” or “bHLH9 gene”.

[0154] Concerning IMB1 polypeptides, any reference hereinafter to a “protein useful in the methods of the invention” is taken to mean an IMB1 polypeptide as defined herein. Any reference hereinafter to a “nucleic acid useful in the methods of the invention” is taken to mean a nucleic acid capable of encoding such an IMB1 polypeptide. The nucleic acid to be introduced into a plant (and therefore useful in performing the methods of the invention) is any nucleic acid encoding the type of protein which will now be described, hereafter also named “IMB1 nucleic acid” or “IMB1 gene”.

[0155] Concerning PCD-like polypeptides, any reference hereinafter to a “protein useful in the methods of the invention” is taken to mean a PCD-like polypeptide as defined herein. Any reference hereinafter to a “nucleic acid useful in the methods of the invention” is taken to mean a nucleic acid capable of encoding such a PCD-like polypeptide. The nucleic acid to be introduced into a plant (and therefore useful in performing the methods of the invention) is any nucleic acid encoding the type of protein which will now be described, hereafter also named “PCD nucleic acid” or “PCD gene”.

[0156] Concerning PRR2 polypeptides, any reference hereinafter to a “protein useful in the methods of the invention” is taken to mean a PRR2 polypeptide as defined herein. Any reference hereinafter to a “nucleic acid sequence useful in the methods of the invention” is taken to mean a nucleic acid sequence capable of encoding such a PRR2 polypeptide. The nucleic acid sequence to be introduced into a plant (and therefore useful in performing the methods of the invention) is any nucleic acid sequence encoding the type of polypeptide, which will now be described, hereafter also named “PRR2 nucleic acid sequence” or “PRR2 gene”.

[0157] A “bHLH9-like polypeptide” as defined herein refers to any polypeptide comprising an HLH domain ((HMM)PFam PF00010, ProfileScan PS50888, SMART SM00353) thereby forming a basic helix-loop-helix domain (Interpro IPR001092), said HLH domain having in increasing order of preference at least 80%, 81%, 82%, 83%, 84%, 85%, 86%, 87%, 88%, 89%, 90%, 91%, 92%, 93%, 94%, 95%, 96%, 97%, 98%, 99% or 100% sequence identity to any of SEQ ID NO: 181 to SEQ ID NO: 268.

[0158] Preferably the bHLH9 polypeptide comprises a motif having at least 50%, 51%, 52%, 53%, 54%, 55%, 56%, 57%, 58%, 59%, 60%, 61%, 62%, 63%, 64%, 65%, 66%, 67%, 68%, 69%, 70%, 71%, 72%, 73%, 74%, 75%, 76%, 77%, 78%, 79%, 80%, 81%, 82%, 83%, 84%, 85%, 86%, 87%, 88%, 89%, 90%, 91%, 92%, 93%, 94%, 95%, 96%, 97%, 98%, 99%, or 100% to any one, preferably to both motifs: Motif 1 (SEQ ID NO: 269): VPCKIRAKRGXXXXXXXXCATHPRSIAERVRRTRISERMRKLQELVPNMDKQTNXTADM, wherein X represents independently any (naturally occurring) amino acid or a gap (that is X is optionally present); and Motif 2 (SEQ ID NO: 269): LDLAVEYIKXLQKQVQXXXLXEXRXK CTCXX, wherein X represents independently any (naturally occurring) amino acid or a gap (i.e. X is optionally present).

[0159] bHLH transcription factor polypeptides have conserved patterns of amino acids found at three positions within the basic region of the bHLH motif, (the 5-9-13 configuration) (Heim at al. 2003). A bHLH9 poypeptide useful in the methods of the invention has preferably a 5-9-13 configuration represented by R-E-R.

[0160] Alternatively a bHLH9 polypeptide useful in the methods of the invention is any polypeptide falling within the Group IX as defined by Heim et al. 2003.

[0161] Preferably, the homologue of a bHLH9 protein has in increasing order of preference at least 25%, 26%, 27%, 28%, 29%, 30%, 31%, 32%, 33%, 34%, 35%, 36%, 37%, 38%, 39%, 40%, 41%, 42%, 43%, 44%, 45%, 46%, 47%, 48%, 49%, 50%, 51%, 52%, 53%, 54%, 55%, 56%, 57%, 58%, 59%, 60%, 61%, 62%, 63%, 64%, 65%, 66%, 67%, 68%, 69%, 70%, 71%, 72%, 73%, 74%, 75%, 76%, 77%, 78%, 79%, 80%, 81%, 82%, 83%, 84%, 85%, 86%, 87%, 88%, 89%, 90%, 91%, 92%, 93%, 94%, 95%, 96%, 97%, 98%, or 99% overall sequence identity to the amino acid of any of the polypeptides of Table A1, preferably to SEQ ID NO: 2. In addition the homologue of a bHLH9 protein comprises an HLH domain as described above. The overall sequence identity is determined using a global alignment algorithm, such as the Needleman Wunsch algorithm in the program GAP (GCG Wisconsin Package, Accelrys), preferably with default parameters and preferably with sequences of mature proteins (i.e. without taking into account secretion signals or transit peptides). Compared to overall sequence identity, the sequence identity will generally be higher when only conserved domains or motifs are considered.

[0162] Alternatively, a bHLH9 polypeptide useful in the methods of the invention has an amino acid sequence which when used in the construction of a phylogenetic tree, such as the one depicted in FIG. 2, clusters within the clade (group) defined by A. thaliana bHLH130 9 AT2G42280; A. thaliana bHLH122 9 AT1G51140; A. thaliana bHLH081 9 AT4G09180; A. thaliana bHLH080 9 AT1G35460; A. thaliana bHLH128 9 AT1G05805; and A. thaliana bHLH129 9 AT2G43140 comprising the amino acid sequence of Arabidopsis thaliana bHLH9 polypeptides rather than with any other group.

[0163] An “IMB1 polypeptide” as defined herein refers to a transcriptional activator protein of the BET family (Bromodomain and ET domain), one of the three bromodomain-protein families (Loyola and Almouzni, 2004). An IMB1 polypeptide comprises a single bromodomain (Pfam PF00439) followed by a NET domain (Duque and Chua, 2003). The NET domain is a part of a larger ET domain, which is involved in protein-protein interactions and which consists of three separate regions: the NET domain (for N-terminal ET), an intervening sequence and the C-terminal SEED motif. Only the NET domain is conserved in all BET proteins (Florence and Faller, Frontiers in BioScience 6, d1008-1018, 2001). The sequence of the NET domain suggests it is bipartite: i.e., two conserved motifs separated by a spacer of variable length. The N-terminal portion is predicted to form two alpha helices and the C-terminal region an extended beta sheet followed by an alpha helix. The spacer separates these two regions and is likely to form a loop. The conservation of the NET domain and bromodomain(s) suggests that all BET proteins have some function or functions in common and so at least partially redundant within individual species (Florence and Faller, 2001). The IMB1 polypeptide furthermore comprises a nuclear targeting signal.

[0164] In addition, the IMB1 polypeptide comprises one or more the following motifs:

Motif 3 (part of the bromodomain, SEQ ID NO: 304)

### A(W/Q/E/H/G)PF(L/M)(D/Q/K/E/H)PV(D/N)V(E/V/K)(G/T)L(G/Q/H/C/R)(L/I)(Y/D/P/H/R)DY(Y/H/F/N/)(Q/K/N/E/D)(I/V)(I/V)(E/T/D/Q)(K/Q/R)PMD(F/L)(S/G/R)TI

### Motif 4 (SEQ ID NO: 305)

### D(V/M)RL(I/V)FXNAM(K/R/N/T)YN

[0165] wherein X in position 7 may be any amino acid, preferably one of K, T, A, E, S, Q or N;

### Motif 5 (SEQ ID NO: 306)

### M(A/S)(K/E/R)(T/F/S/K)L(L/M/S)(E/D/G/A)(K/R)FE(G/E/D)(C/K)

### Motif 6 (SEQ ID NO: 307)

### TL(F/W)(R/K)L

[0166] Preferably, the IMB1 polypeptide comprises also one or more the following motifs:

### Motif 7 (SEQ ID NO: 308)

### EAKDG

### Motif 8 (SEQ ID NO: 309)

### (Q/H/K)LEEL

### Motif 9 (SEQ ID NO: 310)

### LSNEL

### Motif 10 (SEQ ID NO: 311)

### KAL(E/L)(I/L/M)V

### Motif 11 (SEQ ID NO: 312)

### VIQII

[0167] Alternatively, the homologue of an IMB1 protein has in increasing order of preference at least 30%, 31%, 32%, 33%, 34%, 35%, 36%, 37%, 38%, 39%, 40%, 41%, 42%, 43%, 44%, 45%, 46%, 47%, 48%, 49%, 50%, 51%, 52%, 53%, 54%, 55%, 56%, 57%, 58%, 59%, 60%, 61%, 62%, 63%, 64%, 65%, 66%, 67%, 68%, 69%, 70%, 71%, 72%, 73%, 74%, 75%, 76%, 77%, 78%, 79%, 80%, 81%, 82%, 83%, 84%, 85%, 86%, 87%, 88%, 89%, 90%, 91%, 92%, 93%, 94%, 95%, 96%, 97%, 98%, or 99% overall sequence identity to the amino acid represented by SEQ ID NO: 301, provided that the homologous protein comprises the bromodomain, the NET domain and conserved motifs as outlined above. The overall sequence identity is determined using a global alignment algorithm, such as the Needleman Wunsch algorithm in the program GAP (GCG Wisconsin Package, Accelrys), preferably with default parameters and preferably with sequences of mature proteins (i.e. without taking into account secretion signals or transit peptides). Compared to overall sequence identity, the sequence identity will generally be higher when only conserved domains or motifs are considered.

[0168] Preferably, the polypeptide sequence which when used in the construction of a phylogenetic tree, such as the one depicted in FIG. 6, clusters with the group of IMB1/GTE1 class polypeptides comprising the amino acid sequence represented by SEQ ID NO: 301 rather than with any other group.

[0169] A “PCD-like polypeptide” as defined herein refers to any polypeptide comprising a Pterin-4-alpha-carbinolamine dehydratase (PCD) domain (Interpro accession number: IPR001533; pfam accession number: PF01329), said PCD domain preferably having in increasing order of preference at least 50%, 51%, 52%, 53%, 54%, 55%, 56%, 57%, 58%, 59%, 60%, 61%, 62%, 63%, 64%, 65%, 66%, 67%, 68%, 69%, 70%, 71%, 72%, 73%, 74%, 75%, 76%, 77%, 78%, 79%, 80%, 81%, 82%, 83%, 84%, 85%, 86%, 87%, 88%, 89%, 90%, 91%, 92%, 93%, 94%, 95%, 96%, 97%, 98%, 99%, or 100% sequence identity to SEQ ID NO: 83 which represents the PCD domain as present in SEQ ID NO: 359. A “PCD-like polypeptide” has optionally Pterin-4-alpha-carbinolamine dehydratase acitivity (EC:4.2.1.96).

[0170] Preferably the PCD-like polypeptide comprises one or more motifs having at least 50%, 51%, 52%, 53%, 54%, 55%, 56%, 57%, 58%, 59%, 60%, 61%, 62%, 63%, 64%, 65%, 66%, 67%, 68%, 69%, 70%, 71%, 72%, 73%, 74%, 75%, 76%, 77%, 78%, 79%, 80%, 81%, 82%, 83%, 84%, 85%, 86%, 87%, 88%, 89%, 90%, 91%, 92%, 93%, 94%, 95%, 96%, 97%, 98%, 99% or 100% to any one or more of the following motifs:
[0171] (i) Motif 12 (SEQ ID NO: 441): [G/E]-[D/N]-[F/L]-G-A-R-D-P-x(3)-E-x(4)-F-G-[D/E]K;
[0172] (ii) Motif 13 (SEQ ID NO: 442): [E/D/K/H/Q/N]-x(3)-H-[H/N]-[P/C/S]-x(5,6)-[Y/W/F/H]-x(9)-[H/W]-x(8,15)-D;
[0173] (iii) Motif 14 (SEQ ID NO: 443): WK(V/L)(R/K) wherein amino acids in brackets represent alternative amino acids at the same location;
[0174] (iv) Motif 15 (SEQ ID NO: 444): TDFI;
[0175] (v) Motif 16 (SEQ ID NO: 445): (S/V)(V/I)(G/R/S/A)GL(T/S);
[0176] (vi) Motif 17 (SEQ ID NO: 446): LGDF(G/R)(A/R)(R/A)(D/G)P;
[0177] (vii) Motif 18 (SEQ ID NO: 447): H(R/K)ILIP(T/A)
[0178] wherein amino acids in brackets represent alternative amino acids at that position, wherein the number in brackets indicate the number of X amino acids at a given location, and wherein X may be optionally present and when present represents independently any amino acid. Numbers between brackets separated by a comma represent alternatives number of X amino acids at that location.

[0179] Preferably, the homologue of a PCD-like polypeptide useful in the methods of the invention is homologue or an orthologue of any of the polypeptides of Table A3, said homologue or orthologue having in increasing order of preference at least 25%, 26%, 27%, 28%, 29%, 30%, 31%, 32%, 33%, 34%, 35%, 36%, 37%, 38%, 39%, 40%, 41%, 42%, 43%, 44%, 45%, 46%, 47%, 48%, 49%, 50%, 51%, 52%, 53%, 54%, 55%, 56%, 57%, 58%, 59%, 60%, 61%, 62%, 63%, 64%, 65%, 66%, 67%, 68%, 69%, 70%, 71%, 72%, 73%, 74%, 75%, 76%, 77%, 78%, 79%, 80%, 81%, 82%, 83%, 84%, 85%, 86%, 87%, 88%, 89%, 90%, 91%, 92%, 93%, 94%, 95%, 96%, 97%, 98%, 99% or 100% overall sequence identity to the amino acid of any of the polypeptides of Table A3, preferably to SEQ ID NO: 359. In addition the homologue of a PCD-like protein comprises a PCD domain as described above. The sequence identity is determined using a global alignment algorithm, such as the Needleman Wunsch algorithm in the program GAP (GCG Wisconsin Package, Accelrys), preferably with default parameters and preferably with sequences of mature proteins (i.e. without taking into account secretion signals or transit peptides). Compared to overall sequence identity, the sequence identity will generally be higher when only conserved domains or motifs are considered.

[0180] Alternatively, a PCD polypeptide useful in the methods of the invention has an amino acid sequence which when used in the construction of a phylogenetic tree, such as the one depicted in FIG. 3B of Naponelli et al. 2008 (herein reproduced in FIG. 9), clusters within the clade defined by the PCD polypeptides originating from organisms of the viridiplantae kingdom (green plants), i.e. with Arabidopsis-1; Arabidopsis-2; Pinus-1; Pinus-2; Physcomitrella-1; Physcomitrella-2, Zea-1 and Zea-2, rather than with any other group.

[0181] A “PRR2 polypeptide” as defined herein refers to any polypeptide comprising (i) a signal transduction response regulator receiver region with an InterPro entry IPR001789; and (ii) a Myb-like DNA-binding region (SHAQKYF class) with an InterPro entry IPR006447.

[0182] Alternatively or additionally, “PRR2 polypeptide” as defined herein refers to any polypeptide comprising (i) in increasing order of preference at least 50%, 55%, 60%, 65%, 70%, 75%, 80%, 85%, 90%, 95%, 98%, 99% or more amino acid sequence identity to a pseudo response receiver domain as represented by SEQ ID NO: 475; and (ii) in increasing order of preference at least 50%, 55%, 60%, 65%, 70%, 75%, 80%, 85%, 90%, 95%, 98%, 99% or more amino acid sequence identity to a Myb-like DNA binding domain as represented by SEQ ID NO: 476.

[0183] Additionally, a “PRR2 polypeptide” as defined herein further comprises in increasing order of preference at least 50%, 55%, 60%, 65%, 70%, 75%, 80%, 85%, 90%, 95%, 98%, 99% or more amino acid sequence identity to a C-terminal conserved domain as represented by SEQ ID NO: 477.

[0184] Alternatively or additionally, a “PRR2 polypeptide” as defined herein refers to any polypeptide sequence having in increasing order of preference at least 50%, 55%, 60%, 65%, 70%, 75%, 80%, 85%, 90%, 95%, 98%, 99% or more amino acid sequence identity to a polypeptide as represented by SEQ ID NO: 452.

[0185] Alternatively or additionally, a “PRR2 polypeptide” as defined herein refers to any polypeptide having in increasing order of preference at least 50%, 55%, 60%, 65%, 70%, 75%, 80%, 85%, 90%, 95%, 98%, 99% or more amino acid sequence identity to any of the polypeptide sequences given in Table A4 herein.

[0186] Alternatively or additionally, a “PRR2 polypeptide” as defined herein refers to any polypeptide sequence which when used in the construction of a response receiver domain phylogenetic tree, such as the one depicted in FIG. 11, clusters with the APRR2 (pseudo response regulator type 2) group of polypeptides comprising the polypeptide sequences as represented by SEQ ID NO: 452 and SEQ ID NO: 456, rather than with any other group.

[0187] The terms “domain”, “signature” and “motif” are defined in the “definitions” section herein. Specialist databases exist for the identification of domains, for example, SMART (Schultz et al. (1998) Proc. Natl. Acad. Sci. USA 95, 5857-5864; Letunic et al. (2002) Nucleic Acids Res 30, 242-244), InterPro (Mulder et al., (2003) Nucl. Acids. Res. 31, 315-318), Prosite (Bucher and Bairoch (1994), A generalized profile syntax for biomolecular sequences motifs and its function in automatic sequence interpretation. (In) ISMB-94; Proceedings 2nd International Conference on Intelligent Systems for Molecular Biology. Altman R., Brutlag D., Karp P., Lathrop R., Searls D., Eds., pp 53-61, AAAI Press, Menlo Park; Hulo et al., Nucl. Acids. Res. 32:D134-D137, (2004)), or Pfam (Bateman et al., Nucleic Acids Research 30(1): 276-280 (2002)). A set of tools for in silico analysis of protein sequences is available on the ExPASy proteomics server (Swiss Institute of Bioinformatics (Gasteiger et al., ExPASy: the proteomics server for in-depth protein knowledge and analysis, Nucleic Acids Res. 31:3784-3788 (2003)). Domains or motifs may also be identified using routine techniques, such as by sequence alignment.

[0188] Concerning PRR2 polypeptides, an alignment of the polypeptides of Table A4 herein, is shown in FIG. 13. Such alignments are useful for identifying the most conserved domains or motifs between the PRR2 polypeptides as defined herein. Two such domains are (i) a signal transduction response regulator receiver region with an InterPro entry IPR001789 (marked by X's in FIG. 13); and (ii) a Myb-like DNA-binding region (SHAQKYF class) with an InterPro entry IPR006447 (marked by X's in FIG. 13). Another such domain is a C-terminal conserved domain as represented by SEQ ID NO: 477, also marked by X's in FIG. 13.

[0189] Methods for the alignment of sequences for comparison are well known in the art, such methods include GAP, BESTFIT, BLAST, FASTA and TFASTA. GAP uses the algorithm of Needleman and Wunsch ((1970) J Mol Biol 48: 443-453) to find the global (i.e. spanning the complete sequences) alignment of two sequences that maximizes the number of matches and minimizes the number of gaps. The BLAST algorithm (Altschul et al. (1990) J Mol Biol 215: 403-10) calculates percent sequence identity and performs a statistical analysis of the similarity between the two sequences. The software for performing BLAST analysis is publicly available through the National Centre for Biotechnology Information (NCBI). Homologues may readily be identified using, for example, the ClustalW multiple sequence alignment algorithm (version 1.83), with the default pairwise alignment parameters, and a scoring method in percentage. Global percentages of similarity and identity may also be determined using one of the methods available in the MatGAT software package (Campanella et al., BMC Bioinformatics. 2003 Jul. 10; 4:29. MatGAT: an application that generates similarity/identity matrices using protein or DNA sequences.). Minor manual editing may be performed to optimise alignment between conserved motifs, as would be apparent to a person skilled in the art. Furthermore, instead of using full-length sequences for the identification of homologues, specific domains may also be used. The sequence identity values may be determined over the entire nucleic acid or amino acid sequence or over selected domains or conserved motif(s), using the programs mentioned above using the default parameters. For local alignments, the Smith-Waterman algorithm is particularly useful (Smith T F, Waterman M S (1981) J. Mol. Biol. 147(1); 195-7).

[0190] Concerning PRR2 polypeptides, the examples section herein describes in Table B4 the percentage identity between the PRR2 polypeptide as represented by SEQ ID NO: 452 and the PRR2 polypeptides listed in Table A4, which can be as low as 46% amino acid sequence identity. In some instances, the default parameters may be adjusted to modify the stringency of the search. For example using BLAST, the statistical significance threshold (called “expect” value) for reporting matches against database sequences may be increased to show less stringent matches. This way, short nearly exact matches may be identified.

[0191] The task of protein subcellular localisation prediction is important and well studied. Knowing a protein's localisation helps elucidate its function. Experimental methods for protein localization range from immunolocalization to tagging of proteins using green fluorescent protein (GFP) or beta-glucuronidase (GUS). Such methods are accurate although labor-intensive compared with computational methods. Recently much progress has been made in computational prediction of protein localisation from sequence data. Among algorithms well known to a person skilled in the art are available at the ExPASy Proteomics tools hosted by the Swiss Institute for Bioinformatics, for example, PSort, TargetP, ChloroP, LocTree, Predotar, LipoP, MITOPROT, PATS, PTS1, SignalP, TMHMM, and others.

[0192] Furthermore, bHLH9 polypeptides (at least in their native form) typically have DNA binding activity. Tools and techniques for measuring DNA binding activity are well known in the art. In addition, as shown in the present invention, a bHLH9 protein, such as SEQ ID NO: 2, when overexpressed in rice, gives plants having enhanced yield-related traits, in particular emergence (early) vigour and/or increased number of flowers per panicle. Other bioassays are provided in Dombrecht et al. (Plant Cell 19, 2225-2245, 2007). Further details are provided in Examples section.

[0193] Preferably a bHLH9 polypeptide useful in the methods of the invention is able to bind a DNA molecule of in increasing order of preference at least 10, 20, 30, 40, 50, 100, 200, 300, 400, 500, 600, 700, 800, 900, 1000, 2000, 3000 or more nucleotides in length comprising one or more repeats of an E-box motif as represented by SEQ ID NO: 273 (CANNTG), preferably by SEQ ID NO: 274 (CACGTG: G-box). More preferably the E-box and/or G-box motifs are comprised within a promoter, that is, within a polynucleotide capable of driving the expression of a gene, preferably in a plant cell.

[0194] The E-box and G-box DNA-binding motifs as well as methods to assay the binding of a polypeptide to polynucleotide molecules comprising such E-box and G-box motif are well known in the art (Heim et al. 2003; Kim et al. 2007 Plant Mol Biol. 64(4):453-66; Ouwerkek Mol Gen Genet. 1999, 261(4-5):635-43).

[0195] Furthermore, IMB1 polypeptides (at least in their native form) transcription factors and typically have DNA binding activity. Tools and techniques for measuring DNA binding activity are well known in the art and include for example electrophoretic mobility shift assays (EMSA). Further details are provided in the examples section.

[0196] In addition, IMB1 polypeptides, when expressed in rice according to the methods of the present invention as outlined in the examples section, give plants having increased yield related traits, in particular increased seed yield.

[0197] Concerning PCD-like polypeptides, preferably a PCD polypeptide useful in the methods of the invention has Pterin-4-alpha-carbinolamine dehydratase activity (EC:4.2.1.96). Techniques and methods to measure PCD activity are well known in the art, for example in Hauer et al. 1993 J. Biol. Chem. 268 (1993) 4828-4831 or Cronk et al. 1996. Alternatively, a PCD polypeptide is able to complement the growth phenotype of E. coli strain JP2255 (aroF363 pheA361 pheO352 tyrA382 thi-1 strR712 lacY1 xyl-15; Zhao et al., 1994) using the method described by Naponelli et al. 2008.

[0198] In addition, PCD polypeptides, when expressed in rice according to the methods of the present invention as outlined in the Examples section, give plants having increased yield related traits, in particular increased total seed weight (seed yield) per plant, increased number of filled seeds per plant, increased harvest index, increased total number of seeds per plant.

[0199] Concerning bHLH9 polypeptides, the present invention is illustrated by transforming plants with the nucleic acid sequence represented by SEQ ID NO: 1, encoding the polypeptide sequence of SEQ ID NO: 2. However, performance of the invention is not restricted to these sequences; the methods of the invention may advantageously be performed using any bHLH9-encoding nucleic acid or bHLH9 polypeptide as defined herein.

[0200] Examples of nucleic acids encoding bHLH9 polypeptides are given in Table A1 of The Examples section herein. Such nucleic acids are useful in performing the methods of the invention. The amino acid sequences given in Table A1 of The Examples section are example sequences of orthologues and paralogues of the bHLH9 polypeptide represented by SEQ ID NO: 2, the terms “orthologues” and “paralogues” being as defined herein. Further orthologues and paralogues may readily be identified by performing a so-called reciprocal blast search. Typically, this involves a first BLAST involving BLASTing a query sequence (for example using any of the sequences listed in Table A1 of The Examples section) against any sequence database, such as the publicly available NCBI database. BLASTN or TBLASTX (using standard default values) are generally used when starting from a nucleotide sequence, and BLASTP or TBLASTN (using standard default values) when starting from a protein sequence. The BLAST results may optionally be filtered. The full-length sequences of either the filtered results or non-filtered results are then BLASTed back (second BLAST) against sequences from the organism from which the query sequence is derived (where the query sequence is SEQ ID NO: 1 or SEQ ID NO: 2, the second BLAST would therefore be against rice sequences). The results of the first and second BLASTs are then compared. A paralogue is identified if a high-ranking hit from the first blast is from the same species as from which the query sequence is derived, a BLAST back then ideally results in the query sequence amongst the highest hits; an orthologue is identified if a high-ranking hit in the first BLAST is not from the same species as from which the query sequence is derived, and preferably results upon BLAST back in the query sequence being among the highest hits.

[0201] Concerning IMB1 polypeptides, the present invention is illustrated by transforming plants with the nucleic acid sequence represented by SEQ ID NO: 300, encoding the polypeptide sequence of SEQ ID NO: 301. However, performance of the invention is not restricted to these sequences; the methods of the invention may advantageously be performed using any IMB1-encoding nucleic acid or IMB1 polypeptide as defined herein.

[0202] Examples of nucleic acids encoding IMB1 polypeptides are given in Table A2 of The Examples section herein. Such nucleic acids are useful in performing the methods of the invention. The amino acid sequences given in Table A2 of The Examples section are example sequences of orthologues and paralogues of the IMB1 polypeptide represented by SEQ ID NO: 301, the terms “orthologues” and “paralogues” being as defined herein. Further orthologues and paralogues may readily be identified by performing a so-called reciprocal blast search. Typically, this involves a first BLAST involving BLASTing a query sequence (for example using any of the sequences listed in Table A2 of The Examples section) against any sequence database, such as the publicly available NCBI database. BLASTN or TBLASTX (using standard default values) are generally used when starting from a nucleotide sequence, and BLASTP or TBLASTN (using standard default values) when starting from a protein sequence. The BLAST results may optionally be filtered. The full-length sequences of either the filtered results or non-filtered results are then BLASTed back (second BLAST) against sequences from the organism from which the query sequence is derived (where the query sequence is SEQ ID NO: 300 or SEQ ID NO: 301, the second BLAST would therefore be against Solanum lycopersicum sequences). The results of the first and second BLASTs are then compared. A paralogue is identified if a high-ranking hit from the first blast is from the same species as from which the query sequence is derived, a BLAST back then ideally results in the query sequence amongst the highest hits; an orthologue is identified if a high-ranking hit in the first BLAST is not from the same species as from which the query sequence is derived, and preferably results upon BLAST back in the query sequence being among the highest hits.

[0203] Concerning PCD-like polypeptides, the present invention is illustrated by transforming plants with the nucleic acid sequence represented by SEQ ID NO: 358, encoding the polypeptide sequence of SEQ ID NO: 359. However, performance of the invention is not restricted to these sequences; the methods of the invention may advantageously be performed using any PCD-encoding nucleic acid or PCD polypeptide as defined herein.

[0204] Examples of nucleic acids encoding PCD polypeptides are given in Table A3 of The Examples section herein. Such nucleic acids are useful in performing the methods of the invention. The amino acid sequences given in Table A3 of The Examples section are example sequences of orthologues and paralogues of the PCD polypeptide represented by SEQ ID NO: 359, the terms “orthologues” and “paralogues” being as defined herein. Further orthologues and paralogues may readily be identified by performing a so-called reciprocal blast search. Typically, this involves a first BLAST involving BLASTing a query sequence (for example using any of the sequences listed in Table A of The Examples section) against any sequence database, such as the publicly available NCBI database. BLASTN or TBLASTX (using standard default values) are generally used when starting from a nucleotide sequence, and BLASTP or TBLASTN (using standard default values) when starting from a protein sequence. The BLAST results may optionally be filtered. The full-length sequences of either the filtered results or non-filtered results are then BLASTed back (second BLAST) against sequences from the organism from which the query sequence is derived (where the query sequence is SEQ ID NO: 358 or SEQ ID NO: 359, the second BLAST would therefore be against rice sequences). The results of the first and second BLASTs are then compared. A paralogue is identified if a high-ranking hit from the first blast is from the same species as from which the query sequence is derived, a BLAST back then ideally results in the query sequence amongst the highest hits; an orthologue is identified if a high-ranking hit in the first BLAST is not from the same species as from which the query sequence is derived, and preferably results upon BLAST back in the query sequence being among the highest hits.

[0205] Concerning PRR2 polypeptides, the present invention is illustrated by transforming plants with the nucleic acid sequence represented by SEQ ID NO: 451, encoding the PRR2 polypeptide sequence of SEQ ID NO: 452. However, performance of the invention is not restricted to these sequences; the methods of the invention may advantageously be performed using any nucleic acid sequence encoding a PRR2 polypeptide as defined herein.

[0206] Examples of nucleic acid sequences encoding PRR2 polypeptides are given in Table A4 of Example 1 herein. Such nucleic acid sequences are useful in performing the methods of the invention. The polypeptide sequences given in Table A4 of Example 1 are example sequences of orthologues and paralogues of the PRR2 polypeptide represented by SEQ ID NO: 452, the terms “orthologues” and “paralogues” being as defined herein. Further orthologues and paralogues may readily be identified by performing a so-called reciprocal blast search. Typically, this involves a first BLAST involving BLASTing a query sequence (for example using any of the sequences listed in Table A4 of Example 1) against any sequence database, such as the publicly available NCBI database. BLASTN or TBLASTX (using standard default values) are generally used when starting from a nucleotide sequence, and BLASTP or TBLASTN (using standard default values) when starting from a protein sequence. The BLAST results may optionally be filtered. The full-length sequences of either the filtered results or non-filtered results are then BLASTed back (second BLAST) against sequences from the organism from which the query sequence is derived (where the query sequence is SEQ ID NO: 451 or SEQ ID NO: 452, the second BLAST would therefore be against Lycopersicon esculentum sequences). The results of the first and second BLASTs are then compared. A paralogue is identified if a high-ranking hit from the first blast is from the same species as from which the query sequence is derived, a BLAST back then ideally results in the query sequence amongst the highest hits; an orthologue is identified if a high-ranking hit in the first BLAST is not from the same species as from which the query sequence is derived, and preferably results upon BLAST back in the query sequence being among the highest hits.

[0207] High-ranking hits are those having a low E-value. The lower the E-value, the more significant the score (or in other words the lower the chance that the hit was found by chance). Computation of the E-value is well known in the art. In addition to E-values, comparisons are also scored by percentage identity. Percentage identity refers to the number of identical nucleotides (or amino acids) between the two compared nucleic acid (or polypeptide) sequences over a particular length. In the case of large families, ClustalW may be used, followed by a neighbour joining tree, to help visualize clustering of related genes and to identify orthologues and paralogues.

[0208] Nucleic acid variants may also be useful in practising the methods of the invention. Examples of such variants include nucleic acids encoding homologues and derivatives of any one of the amino acid sequences given in Table A1 to A4 of The Examples section, the terms “homologue” and “derivative” being as defined herein and also include variants in which codon usage is optimised or in which miRNA target sites are removed. Also useful in the methods of the invention are nucleic acids encoding homologues and derivatives of orthologues or paralogues of any one of the amino acid sequences given in Table A1 to A4 The Examples section. Homologues and derivatives useful in the methods of the present invention have substantially the same biological and functional activity as the unmodified protein from which they are derived.

[0209] Further nucleic acid variants useful in practising the methods of the invention include portions of nucleic acids encoding bHLH9 polypeptides, or IMB1 polypeptides, or PCD polypeptides, or PRR2 polypeptides, nucleic acids hybridising to nucleic acids encoding bHLH9 polypeptides, or IMB1 polypeptides, or PCD polypeptides, or PRR2 polypeptides, splice variants of nucleic acids encoding bHLH9 polypeptides, or IMB1 polypeptides, or PCD polypeptides, or PRR2 polypeptides, allelic variants of nucleic acids encoding bHLH9 polypeptides, or IMB1 polypeptides, or PCD polypeptides, or PRR2 polypeptides, and variants of nucleic acids encoding bHLH9 polypeptides obtained by gene shuffling. The terms hybridising sequence, splice variant, allelic variant and gene shuffling are as described herein.

[0210] Nucleic acids encoding bHLH9 polypeptides, or IMB1 polypeptides, or PCD polypeptides, or PRR2 polypeptides, need not be full-length nucleic acids, since performance of the methods of the invention does not rely on the use of full-length nucleic acid sequences. According to the present invention, there is provided a method for enhancing yield-related traits in plants, comprising introducing and expressing in a plant a portion of any one of the nucleic acid sequences given in Table A1 to A4 of The Examples section, or a portion of a nucleic acid encoding an orthologue, paralogue or homologue of any of the amino acid sequences given in Table A1 to A4 of The Examples section.

[0211] A portion of a nucleic acid may be prepared, for example, by making one or more deletions to the nucleic acid. The portions may be used in isolated form or they may be fused to other coding (or non-coding) sequences in order to, for example, produce a protein that combines several activities. When fused to other coding sequences, the resultant polypeptide produced upon translation may be bigger than that predicted for the protein portion.

[0212] Concerning bHLH9 polypeptides, portions useful in the methods of the invention, encode a bHLH9 polypeptide as defined herein, and have substantially the same biological activity as the amino acid sequences given in Table A1 of The Examples section. Preferably, the portion is a portion of any one of the nucleic acids given in Table A1 of The Examples section, or is a portion of a nucleic acid encoding an orthologue or paralogue of any one of the amino acid sequences given in Table A1 of The Examples section. Preferably the portion is at least 150, 200, 250, 300, 350, 400 450, 500, 550, 600, 650, 700, 750, 800, 850, 900, 950, 1000 consecutive nucleotides in length, the consecutive nucleotides being of any one of the nucleic acid sequences given in Table A1 of The Examples section, or of a nucleic acid encoding an orthologue or paralogue of any one of the amino acid sequences given in Table A1 of The Examples section. Most preferably the portion is a portion of the nucleic acid of SEQ ID NO: 1. Preferably, the portion encodes a fragment of an amino acid sequence which, when used in the construction of a phylogenetic tree, such as the one depicted in FIG. 2, clusters within the clade (group) defined by A. thaliana bHLH130 9 AT2G42280; A. thaliana bHLH122 9 AT1G51140; A. thaliana bHLH081 9 AT4G09180; A. thaliana bHLH080 9 AT1G35460; A. thaliana bHLH128 9 AT1G05805; and A. thaliana bHLH129 9 AT2G43140 comprising the amino acid sequence of Arabidopsis thaliana bHLH9 polypeptides rather than with any other group.

[0213] Concerning IMB1 polypeptides, portions useful in the methods of the invention, encode an IMB1 polypeptide as defined herein, and have substantially the same biological activity as the amino acid sequences given in Table A2 of The Examples section. Preferably, the portion is a portion of any one of the nucleic acids given in Table A2 of The Examples section, or is a portion of a nucleic acid encoding an orthologue or paralogue of any one of the amino acid sequences given in Table A2 of The Examples section. Preferably the portion is at least 400, 450, 500, 550, 600, 650, 700, 750, 800, 850, 900, 950, 1000, 1050, 1100, 1150, 1200, 1250, 1300, 1350, 1400, 1450, 1500, 1550 consecutive nucleotides in length, the consecutive nucleotides being of any one of the nucleic acid sequences given in Table A2 of The Examples section, or of a nucleic acid encoding an orthologue or paralogue of any one of the amino acid sequences given in Table A2 of The Examples section. Most preferably the portion is a portion of the nucleic acid of SEQ ID NO: 300. Preferably, the portion encodes a fragment of an amino acid sequence which, when used in the construction of a phylogenetic tree, such as the one depicted in FIG. 6, clusters with the group of IMB1/GTE1 class polypeptides comprising the amino acid sequence represented by SEQ ID NO: 301 rather than with any other group.

[0214] Concerning PCD-like polypeptides, portions useful in the methods of the invention, encode a PCD-like polypeptide as defined herein, and have substantially the same biological activity as the amino acid sequences given in Table A3 of The Examples section. Preferably, the portion is a portion of any one of the nucleic acids given in Table A3 of The Examples section, or is a portion of a nucleic acid encoding an orthologue or paralogue of any one of the amino acid sequences given in Table A3 of The Examples section. Preferably the portion is at least 100, 200, 300, 400, 500, 550, 600, 650, 700, 750, 800, 850, 900, 950, 1000 consecutive nucleotides in length, the consecutive nucleotides being of any one of the nucleic acid sequences given in Table A3 of The Examples section, or of a nucleic acid encoding an orthologue or paralogue of any one of the amino acid sequences given in Table A3 of The Examples section. Most preferably the portion is a portion of the nucleic acid of SEQ ID NO: 358. Preferably, the portion encodes a fragment of an amino acid sequence which, when used in the construction of a phylogenetic tree, such as the one depicted in FIG. 3B of Naponelli et al. 2008 (herein reproduced in FIG. 9), clusters within the clade defined by the PCD polypeptides originating from organisms of the viridiplantae kingdom (green plants), i.e. with Arabidopsis-1; Arabidopsis-2; Pinus-1; Pinus-2; Physcomitrella-1; Physcomitrella-2, Zea-1 and Zea-2, rather than with any other group.

[0215] Concerning PRR2 polypeptides, portions useful in the methods of the invention, encode a PRR2 polypeptide as defined herein, and have substantially the same biological activity as the polypeptide sequences given in Table A4 of The Examples section. Preferably, the portion is a portion of any one of the nucleic acid sequences given in Table A4 of The Examples section, or is a portion of a nucleic acid sequence encoding an orthologue or paralogue of any one of the polypeptide sequences given in Table A4 of The Examples section. Preferably the portion is, in increasing order of preference at least 800, 900, 1000, 1100, 1150, 1200, 1250, 1300, 1350, 1400, 1450, 1500, 1550, 1600, 1650 or more consecutive nucleotides in length, the consecutive nucleotides being of any one of the nucleic acid sequences given in Table A4 of The Examples section, or of a nucleic acid sequence encoding an orthologue or paralogue of any one of the polypeptide sequences given in Table A4 of The Examples section. Preferably, the portion is a portion of a nucleic sequence encoding a polypeptide sequence comprising (i) in increasing order of preference at least 50%, 55%, 60%, 65%, 70%, 75%, 80%, 85%, 90%, 95%, 98%, 99% or more amino acid sequence identity to a pseudo response receiver domain as represented by SEQ ID NO: 475; and (ii) in increasing order of preference at least 50%, 55%, 60%, 65%, 70%, 75%, 80%, 85%, 90%, 95%, 98%, 99% or more amino acid sequence identity to a Myb-like DNA binding domain as represented by SEQ ID NO: 476. More preferably, the portion is a portion of a nucleic sequence encoding a polypeptide sequence having in increasing order of preference at least 50%, 55%, 60%, 65%, 70%, 75%, 80%, 85%, 90%, 95%, 98%, 99% or more amino acid sequence identity to the PRR2 polypeptide as represented by SEQ ID NO: 452 or to any of the polypeptide sequences given in Table A4 herein. Most preferably, the portion is a portion of the nucleic acid sequence of SEQ ID NO: 451.

[0216] Another nucleic acid variant useful in the methods of the invention is a nucleic acid capable of hybridising, under reduced stringency conditions, preferably under stringent conditions, with a nucleic acid encoding a bHLH9 polypeptide, or an IMB1 polypeptide, or a PCD polypeptide, or a PRR2 polypeptide, as defined herein, or with a portion as defined herein.

[0217] According to the present invention, there is provided a method for enhancing and/or increasing yield-related traits in plants, comprising introducing and expressing in a plant a nucleic acid capable of hybridizing to any one of the nucleic acids given in Table A1 to A4 of The Examples section, or comprising introducing and expressing in a plant a nucleic acid capable of hybridising to a nucleic acid encoding an orthologue, paralogue or homologue of any of the nucleic acid sequences given in Table A1 to A4 of The Examples section.

[0218] Concerning bHLH9 polypeptides, hybridising sequences useful in the methods of the invention encode a bHLH9 polypeptide as defined herein, having substantially the same biological activity as the amino acid sequences given in Table A1 of The Examples section. Preferably, the hybridising sequence is capable of hybridising to the complement of any one of the nucleic acids given in Table A1 of The Examples section, or to a portion of any of these sequences, a portion being as defined above, or the hybridising sequence is capable of hybridising to the complement of a nucleic acid encoding an orthologue or paralogue of any one of the amino acid sequences given in Table A1 of The Examples section. Most preferably, the hybridising sequence is capable of hybridising to the complement of a nucleic acid as represented by SEQ ID NO: 1 or to a portion thereof.

[0219] Preferably, the hybridising sequence encodes a polypeptide with an amino acid sequence which, when full-length and used in the construction of a phylogenetic tree, such as the one depicted in FIG. 2, clusters within the clade (group) defined by A. thaliana bHLH130 9 AT2G42280; A. thaliana bHLH122 9 AT1G51140; A. thaliana bHLH081 9 AT4G09180; A. thaliana bHLH080 9 AT1G35460; A. thaliana bHLH128 9 AT1G05805; and A. thaliana bHLH129 9 AT2G43140 comprising the amino acid sequence of Arabidopsis thaliana bHLH9 polypeptides rather than with any other group.

[0220] Concerning IMB1 polypeptides, hybridising sequences useful in the methods of the invention encode an IMB1 polypeptide as defined herein, having substantially the same biological activity as the amino acid sequences given in Table A2 of The Examples section. Preferably, the hybridising sequence is capable of hybridising to the complement of any one of the nucleic acids given in Table A2 of The Examples section, or to a portion of any of these sequences, a portion being as defined above, or the hybridising sequence is capable of hybridising to the complement of a nucleic acid encoding an orthologue or paralogue of any one of the amino acid sequences given in Table A2 of The Examples section. Most preferably, the hybridising sequence is capable of hybridising to the complement of a nucleic acid as represented by SEQ ID NO: 300 or to a portion thereof.

[0221] Preferably, the hybridising sequence encodes a polypeptide with an amino acid sequence which, when full-length and used in the construction of a phylogenetic tree, such as the one depicted in FIG. 6, clusters with the group of IMB1/GTE1 class polypeptides comprising the amino acid sequence represented by SEQ ID NO: 301 rather than with any other group.

[0222] Concerning PCD-like polypeptides, hybridising sequences useful in the methods of the invention encode a PCD-like polypeptide as defined herein, having substantially the same biological activity as the amino acid sequences given in Table A3 of The Examples section. Preferably, the hybridising sequence is capable of hybridising to the complement of any one of the nucleic acids given in Table A3 of The Examples section, or to a portion of any of these sequences, a portion being as defined above, or the hybridising sequence is capable of hybridising to the complement of a nucleic acid encoding an orthologue or paralogue of any one of the amino acid sequences given in Table A3 of The Examples section. Most preferably, the hybridising sequence is capable of hybridising to the complement of a nucleic acid as represented by SEQ ID NO: 358 or to a portion thereof.

[0223] Preferably, the hybridising sequence encodes a polypeptide with an amino acid sequence which, when full-length and used in the construction of a phylogenetic tree, such as the one depicted in FIG. 3B of Naponelli et al. 2008 (herein reproduced in FIG. 2), clusters within the clade defined by the PCD polypeptides originating from organisms of the viridiplantae kingdom (green plants), i.e. with Arabidopsis-1; Arabidopsis-2; Pinus-1; Pinus-2; Physcomitrella-1; Physcomitrella-2, Zea-1 and Zea-2, rather than with any other group.

[0224] Concerning PRR2 polypeptides, hybridising sequences useful in the methods of the invention encode a PRR2 polypeptide as defined herein, and have substantially the same biological activity as the polypeptide sequences given in Table A4 of The Examples section. Preferably, the hybridising sequence is capable of hybridising to any one of the nucleic acid sequences given in Table A4 of The Examples section, or to a complement thereof, or to a portion of any of these sequences, a portion being as defined above, or wherein the hybridising sequence is capable of hybridising to a nucleic acid sequence encoding an orthologue or paralogue of any one of the polypeptide sequences given in Table A4 of The Examples section, or to a complement thereof. Preferably, the hybridising sequence is capable of hybridising to a nucleic acid sequence encoding a polypeptide sequence comprising (i) in increasing order of preference at least 50%, 55%, 60%, 65%, 70%, 75%, 80%, 85%, 90%, 95%, 98%, 99% or more amino acid sequence identity to a pseudo response receiver domain as represented by SEQ ID NO: 475; and (ii) in increasing order of preference at least 50%, 55%, 60%, 65%, 70%, 75%, 80%, 85%, 90%, 95%, 98%, 99% or more amino acid sequence identity to a Myb-like DNA binding domain as represented by SEQ ID NO: 476. More preferably, the hybridising sequence is capable of hybridising to a nucleic acid sequence encoding a polypeptide sequence having in increasing order of preference at least 50%, 55%, 60%, 65%, 70%, 75%, 80%, 85%, 90%, 95%, 98%, 99% or more amino acid sequence identity to the PRR2 polypeptide as represented by SEQ ID NO: 452 or to any of the polypeptide sequences given in Table A4 herein. Most preferably, the hybridising sequence is capable of hybridising to a nucleic acid sequence as represented by SEQ ID NO: 451 or to a portion thereof.

[0225] Another nucleic acid variant useful in the methods of the invention is a splice variant encoding a bHLH9 polypeptide, or an IMB1 polypeptide, or a PCD polypeptide, or a PRR2 polypeptide, as defined hereinabove, a splice variant being as defined herein.

[0226] According to the present invention, there is provided a method for enhancing and/or increasing yield-related traits in plants, comprising introducing and expressing in a plant a splice variant of any one of the nucleic acid sequences given in Table A1 to A4 of The Examples section, or a splice variant of a nucleic acid encoding an orthologue, paralogue or homologue of any of the amino acid sequences given in Table A1 to A4 of The Examples section.

[0227] Concerning bHLH9 polypeptides, preferred splice variants are splice variants of a nucleic acid represented by SEQ ID NO: 1, or a splice variant of a nucleic acid encoding an orthologue or paralogue of SEQ ID NO: 2. Preferably, the amino acid sequence encoded by the splice variant, when used in the construction of a phylogenetic tree, such as the one depicted in FIG. 2, clusters within the clade (group) defined by A. thaliana bHLH130 9 AT2G42280; A. thaliana bHLH122 9 AT1G51140; A. thaliana bHLH081 9 AT4G09180; A. thaliana bHLH080 9 AT1G35460; A. thaliana bHLH128 9 AT1G05805; and A. thaliana bHLH129 9 AT2G43140 comprising the amino acid sequence of Arabidopsis thaliana bHLH9 polypeptides rather than with any other group.

[0228] Concerning IMB1 polypeptides, preferred splice variants are splice variants of a nucleic acid represented by SEQ ID NO: 300, or a splice variant of a nucleic acid encoding an orthologue or paralogue of SEQ ID NO: 301. Preferably, the amino acid sequence encoded by the splice variant, when used in the construction of a phylogenetic tree, such as the one depicted in FIG. 6, clusters with the group of IMB1/GTE1 class polypeptides comprising the amino acid sequence represented by SEQ ID NO: 301 rather than with any other group.

[0229] Concerning PCD-like polypeptides, preferred splice variants are splice variants of a nucleic acid represented by SEQ ID NO: 358, or a splice variant of a nucleic acid encoding an orthologue or paralogue of SEQ ID NO: 359. Preferably, the amino acid sequence encoded by the splice variant, when used in the construction of a phylogenetic tree, such as the one depicted in FIG. 3B of Naponelli et al. 2008 (herein reproduced in FIG. 9), clusters within the clade defined by the PCD polypeptides originating from organisms of the viridiplantae kingdom (green plants), i.e. with Arabidopsis-1; Arabidopsis-2; Pinus-1; Pinus-2; Physcomitrella-1; Physcomitrella-2, Zea-1 and Zea-2, rather than with any other group.

[0230] Concerning PRR2 polypeptides, preferred splice variants are splice variants of a nucleic acid sequence represented by SEQ ID NO: 451, or a splice variant of a nucleic acid sequence encoding an orthologue or paralogue of SEQ ID NO: 452. Preferably, the splice variant is a splice variant of a nucleic acid sequence encoding a polypeptide sequence comprising (i) in increasing order of preference at least 50%, 55%, 60%, 65%, 70%, 75%, 80%, 85%, 90%, 95%, 98%, 99% or more amino acid sequence identity to a pseudo response receiver domain as represented by SEQ ID NO: 475; and (ii) in increasing order of preference at least 50%, 55%, 60%, 65%, 70%, 75%, 80%, 85%, 90%, 95%, 98%, 99% or more amino acid sequence identity to a Myb-like DNA binding domain as represented by SEQ ID NO: 476. More preferably, the splice variant is a splice variant of a nucleic acid sequence encoding a polypeptide sequence having in increasing order of preference at least 50%, 55%, 60%, 65%, 70%, 75%, 80%, 85%, 90%, 95%, 98%, 99% or more amino acid sequence identity to the PRR2 polypeptide as represented by SEQ ID NO: 452 or to any of the polypeptide sequences given in Table A4 herein. Most preferably, the splice variant is a splice variant of a nucleic acid sequence as represented by SEQ ID NO: 451, or of a nucleic acid sequence encoding a polypeptide sequence as represented by SEQ ID NO: 452.

[0231] Another nucleic acid variant useful in performing the methods of the invention is an allelic variant of a nucleic acid encoding a bHLH9 polypeptide, or an IMB1 polypeptide, or a PCD polypeptide, or a PRR2 polypeptide, as defined hereinabove, an allelic variant being as defined herein.

[0232] According to the present invention, there is provided a method for enhancing and/or increasing yield-related traits in plants, comprising introducing and expressing in a plant an allelic variant of any one of the nucleic acids given in Table A1 to A4 of The Examples section, or comprising introducing and expressing in a plant an allelic variant of a nucleic acid encoding an orthologue, paralogue or homologue of any of the amino acid sequences given in Table A1 to A4 of The Examples section.

[0233] Concerning bHLH9 polypeptides, the polypeptides encoded by allelic variants useful in the methods of the present invention have substantially the same biological activity as the bHLH9 polypeptide of SEQ ID NO: 2 and any of the amino acids depicted in Table A1 of The Examples section. Allelic variants exist in nature, and encompassed within the methods of the present invention is the use of these natural alleles. Preferably, the allelic variant is an allelic variant of SEQ ID NO: 1 or an allelic variant of a nucleic acid encoding an orthologue or paralogue of SEQ ID NO: 2. Preferably, the amino acid sequence encoded by the allelic variant, when used in the construction of a phylogenetic tree, such as the one depicted in FIG. 2, clusters within the clade (group) defined by A. thaliana bHLH130 9 AT2G42280; A. thaliana bHLH122 9 AT1G51140; A. thaliana bHLH081 9 AT4G09180; A. thaliana bHLH080 9 AT1G35460; A. thaliana bHLH 128 9 AT1G05805; and A. thaliana bHLH129 9 AT2G43140 comprising the amino acid sequence of Arabidopsis thaliana bHLH9 polypeptides rather than with any other group.

[0234] Concerning IMB1 polypeptides, the polypeptides encoded by allelic variants useful in the methods of the present invention have substantially the same biological activity as the IMB1 polypeptide of SEQ ID NO: 301 and any of the amino acids depicted in Table A2 of The Examples section. Allelic variants exist in nature, and encompassed within the methods of the present invention is the use of these natural alleles. Preferably, the allelic variant is an allelic variant of SEQ ID NO: 300 or an allelic variant of a nucleic acid encoding an orthologue or paralogue of SEQ ID NO: 301. Preferably, the amino acid sequence encoded by the allelic variant, when used in the construction of a phylogenetic tree, such as the one depicted in FIG. 6, clusters with the group of IMB1/GTE1 class polypeptides comprising the amino acid sequence represented by SEQ ID NO: 301 rather than with any other group.

[0235] Concerning PCD-like polypeptides, the polypeptides encoded by allelic variants useful in the methods of the present invention have substantially the same biological activity as the PCD polypeptide of SEQ ID NO: 359 and any of the amino acids depicted in Table A3 of The Examples section. Allelic variants exist in nature, and encompassed within the methods of the present invention is the use of these natural alleles. Preferably, the allelic variant is an allelic variant of SEQ ID NO: 358 or an allelic variant of a nucleic acid encoding an orthologue or paralogue of SEQ ID NO: 359. Preferably, the amino acid sequence encoded by the allelic variant, when used in the construction of a phylogenetic tree, such as the one depicted in FIG. 3B of Naponelli et al. 2008 (herein reproduced in FIG. 9), clusters within the clade defined by the PCD polypeptides originating from organisms of the viridiplantae kingdom (green plants), i.e. with Arabidopsis-1; Arabidopsis-2; Pinus-1; Pinus-2; Physcomitrella-1; Physcomitrella-2, Zea-1 and Zea-2, rather than with any other group.

[0236] Concerning PRR2 polypeptides, the allelic variants useful in the methods of the present invention have substantially the same biological activity as the PRR2 polypeptide of SEQ ID NO: 452 and any of the polypeptide sequences depicted in Table A4 of The Examples section. Allelic variants exist in nature, and encompassed within the methods of the present invention is the use of these natural alleles. Preferably, the allelic variant is an allelic variant of a polypeptide sequence comprising (i) in increasing order of preference at least 50%, 55%, 60%, 65%, 70%, 75%, 80%, 85%, 90%, 95%, 98%, 99% or more amino acid sequence identity to a pseudo response receiver domain as represented by SEQ ID NO: 475; and (ii) in increasing order of preference at least 50%, 55%, 60%, 65%, 70%, 75%, 80%, 85%, 90%, 95%, 98%, 99% or more amino acid sequence identity to a Myb-like DNA binding domain as represented by SEQ ID NO: 476. More preferably the allelic variant is an allelic variant encoding a polypeptide sequence having in increasing order of preference at least 50%, 55%, 60%, 65%, 70%, 75%, 80%, 85%, 90%, 95%, 98%, 99% or more amino acid sequence identity to the PRR2 polypeptide as represented by SEQ ID NO: 452 or to any of the polypeptide sequences given in Table A4 herein. Most preferably, the allelic variant is an allelic variant of SEQ ID NO: 451 or an allelic variant of a nucleic acid sequence encoding an orthologue or paralogue of SEQ ID NO: 452.

[0237] Gene shuffling or directed evolution may also be used to generate variants of nucleic acids encoding bHLH9 polypeptides, or IMB1 polypeptides, or PCD polypeptides, or PRR2 polypeptides, as defined above; the term “gene shuffling” being as defined herein.

[0238] According to the present invention, there is provided a method for enhancing yield-related traits in plants, comprising introducing and expressing in a plant a variant of any one of the nucleic acid sequences given in Table A1 to A4 of The Examples section, or comprising introducing and expressing in a plant a variant of a nucleic acid encoding an orthologue, paralogue or homologue of any of the amino acid sequences given in Table A1 to A4 of The Examples section, which variant nucleic acid is obtained by gene shuffling.

[0239] Concerning bHLH9 polypeptides, preferably, the amino acid sequence encoded by the variant nucleic acid obtained by gene shuffling, when used in the construction of a phylogenetic tree such as the one depicted in FIG. 2, clusters within the clade (group) defined by A. thaliana bHLH130 9 AT2G42280; A. thaliana bHLH122 9 AT1G51140; A. thaliana bHLH081 9 AT4G09180; A. thaliana bHLH080 9 AT1G35460; A. thaliana bHLH128 9 AT1G05805; and A. thaliana bHLH129 9 AT2G43140 comprising the amino acid sequence of Arabidopsis thaliana bHLH9 polypeptides rather than with any other group.

[0240] Concerning IMB1 polypeptides, treferably, the amino acid sequence encoded by the variant nucleic acid obtained by gene shuffling, when used in the construction of a phylogenetic tree such as the one depicted in FIG. 6, clusters with the group of IMB1/GTE1 class polypeptides comprising the amino acid sequence represented by SEQ ID NO: 301 rather than with any other group.

[0241] Concerning PCD-like polypeptides, preferably, the amino acid sequence encoded by the variant nucleic acid obtained by gene shuffling, when used in the construction of a phylogenetic such as the one depicted in FIG. 3B of Naponelli et al. 2008 (herein reproduced in FIG. 9), clusters within the clade defined by the PCD polypeptides originating from organisms of the viridiplantae kingdom (green plants), i.e. with Arabidopsis-1; Arabidopsis-2; Pinus-1; Pinus-2; Physcomitrella-1; Physcomitrella-2, Zea-1 and Zea-2, rather than with any other group.

[0242] Concerning PRR2 polypeptides, preferably, the variant nucleic acid sequence obtained by gene shuffling encodes a polypeptide sequence comprising (i) in increasing order of preference at least 50%, 55%, 60%, 65%, 70%, 75%, 80%, 85%, 90%, 95%, 98%, 99% or more amino acid sequence identity to a pseudo response receiver domain as represented by SEQ ID NO: 475; and (ii) in increasing order of preference at least 50%, 55%, 60%, 65%, 70%, 75%, 80%, 85%, 90%, 95%, 98%, 99% or more amino acid sequence identity to a Myb-like DNA binding domain as represented by SEQ ID NO: 476. More preferably, the variant nucleic acid sequence obtained by gene shuffling encodes a polypeptide sequence having in increasing order of preference at least 50%, 55%, 60%, 65%, 70%, 75%, 80%, 85%, 90%, 95%, 98%, 99% or more amino acid sequence identity to the PRR2 polypeptide as represented by SEQ ID NO: 452 or to any of the polypeptide sequences given in Table A1 herein. Most preferably, the nucleic acid sequence obtained by gene shuffling encodes a polypeptide sequence as represented by SEQ ID NO: 452.

[0243] Furthermore, nucleic acid variants may also be obtained by site-directed mutagenesis. Several methods are available to achieve site-directed mutagenesis, the most common being PCR based methods (Current Protocols in Molecular Biology. Wiley Eds.).

[0244] Nucleic acids encoding bHLH9 polypeptides may be derived from any natural or artificial source. The nucleic acid may be modified from its native form in composition and/or genomic environment through deliberate human manipulation. Preferably the bHLH9 polypeptide-encoding nucleic acid is from a plant, further preferably from a monocotyledonous plant, more preferably from the family Poaceae, most preferably the nucleic acid is from Oryza sativa.

[0245] Advantageously, the invention also provides hitherto unknown bHLH9-encoding nucleic acids and bHLH9 polypeptides.

[0246] According to a further embodiment of the present invention, there is therefore provided an isolated nucleic acid molecule selected from:
[0247] (i) a nucleic acid represented by any one of SEQ ID NO: 19, 45, 47, 165, 167 and 169;
[0248] (ii) the complement of a nucleic acid represented by any one of SEQ ID NO: 19, 45, 47, 165, 167 and 169;
[0249] (iii) a nucleic acid encoding the polypeptide as represented by any one of SEQ ID NO: 20, 46, 48, 166, 168 and 170, preferably as a result of the degeneracy of the genetic code, said isolated nucleic acid can be derived from a polypeptide sequence as represented by any one of SEQ ID NO: 20, 46, 48, 166, 168 and 170 and further preferably confers enhanced yield-related traits relative to control plants;
[0250] (iv) a nucleic acid having, in increasing order of preference at least 30%, 31%, 32%, 33%, 34%, 35%, 36%, 37%, 38%, 39%, 40%, 41%, 42%, 43%, 44%, 45%, 46%, 47%, 48%, 49%, 50%, 51%, 52%, 53%, 54%, 55%, 56%, 57%, 58%, 59%, 60%, 61%, 62%, 63%, 64%, 65%, 66%, 67%, 68%, 69%, 70%, 71%, 72%, 73%, 74%, 75%, 76%, 77%, 78%, 79%, 80%, 81%, 82%, 83%, 84%, 85%, 86%, 87%, 88%, 89%, 90%, 91%, 92%, 93%, 94%, 95%, 96%, 97%, 98%, or 99% sequence identity with any of the nucleic acid sequences of Table A1 and Table C2 and further preferably conferring enhanced yield-related traits relative to control plants;
[0251] (v) a nucleic acid molecule which hybridizes with a nucleic acid molecule of (i) to (iv) under stringent hybridization conditions and preferably confers enhanced yield-related traits relative to control plants;
[0252] (vi) a nucleic acid encoding a bHLH9 polypeptide having, in increasing order of preference, at least 50%, 51%, 52%, 53%, 54%, 55%, 56%, 57%, 58%, 59%, 60%, 61%, 62%, 63%, 64%, 65%, 66%, 67%, 68%, 69%, 70%, 71%, 72%, 73%, 74%, 75%, 76%, 77%, 78%, 79%, 80%, 81%, 82%, 83%, 84%, 85%, 86%, 87%, 88%, 89%, 90%, 91%, 92%, 93%, 94%, 95%, 96%, 97%, 98%, or 99% sequence identity to the amino acid sequence represented by any one of SEQ ID NO: 20, 46, 48, 166, 168, 170 and any of the other amino acid sequences in Table A1 and Table C2 and preferably conferring enhanced yield-related traits relative to control plants.

[0253] According to a further embodiment of the present invention, there is also provided an isolated polypeptide selected from:
[0254] (i) an amino acid sequence represented by any one of SEQ ID NO: 20, 46, 48, 166, 168 and 170;
[0255] (ii) an amino acid sequence having, in increasing order of preference, at least 50%, 51%, 52%, 53%, 54%, 55%, 56%, 57%, 58%, 59%, 60%, 61%, 62%, 63%, 64%, 65%, 66%, 67%, 68%, 69%, 70%, 71%, 72%, 73%, 74%, 75%, 76%, 77%, 78%, 79%, 80%, 81%, 82%, 83%, 84%, 85%, 86%, 87%, 88%, 89%, 90%, 91%, 92%, 93%, 94%, 95%, 96%, 97%, 98%, or 99% sequence identity to the amino acid sequence represented by any one of SEQ ID NO: 20, 46, 48, 166, 168 and 170, and any of the other amino acid sequences in Table A1 and Table C2 and preferably conferring enhanced yield-related traits relative to control plants.
[0256] (iii) derivatives of any of the amino acid sequences given in (i) or (ii) above.

[0257] Nucleic acids encoding IMB1 polypeptides may be derived from any natural or artificial source. The nucleic acid may be modified from its native form in composition and/or genomic environment through deliberate human manipulation. Preferably the IMB1 polypeptide-encoding nucleic acid is from a plant, further preferably from a dicotyledonous plant, more preferably from the family Solanaceae, most preferably the nucleic acid is from Solanum lycopersicum.

[0258] Nucleic acids encoding PCD polypeptides may be derived from any natural or artificial source. The nucleic acid may be modified from its native form in composition and/or genomic environment through deliberate human manipulation. Preferably the PCD polypeptide-encoding nucleic acid is from a plant, further preferably from a monocotyledonous plant, more preferably from the family Poaceae, most preferably the nucleic acid is from Oryza sativa.

[0259] Nucleic acid sequences encoding PRR2 polypeptides may be derived from any natural or artificial source. The nucleic acid sequence may be modified from its native form in composition and/or genomic environment through deliberate human manipulation. The nucleic acid sequence encoding a PRR2 polypeptide is from a plant, further preferably from a dicotyledonous plant, more preferably from the family Solanaceae, most preferably the nucleic acid sequence is from Lycopersicon esculentum.

[0260] Performance of the methods of the invention gives plants having enhanced yield-related traits. In particular performance of the methods of the invention gives plants having increased yield, especially increased seed yield relative to control plants. The terms “yield” and “seed yield” are described in more detail in the “definitions” section herein.

[0261] Reference herein to enhanced yield-related traits is taken to mean an increase in biomass (weight) of one or more parts of a plant, which may include aboveground (harvestable) parts and/or (harvestable) parts below ground. In particular, such harvestable parts are seeds, and performance of the methods of the invention results in plants having increased seed yield relative to the seed yield of control plants. Concerning IMB1 polypeptides, the term “yield-related traits”, “yield” or “seed yield” as used in the present invention does not encompass increased oil content of a plant or a plant seed.

[0262] Taking corn as an example, a yield increase may be manifested as one or more of the following: increase in the number of plants established per square meter, an increase in the number of ears per plant, an increase in the number of rows, number of kernels per row, kernel weight, thousand kernel weight, ear length/diameter, increase in the seed filling rate (which is the number of filled seeds divided by the total number of seeds and multiplied by 100), among others. Taking rice as an example, a yield increase may manifest itself as an increase in one or more of the following: number of plants per square meter, number of panicles per plant, number of spikelets per panicle, number of flowers (florets) per panicle (which is expressed as a ratio of the number of filled seeds over the number of primary panicles), increase in the seed filling rate (which is the number of filled seeds divided by the total number of seeds and multiplied by 100), increase in thousand kernel weight, among others.

[0263] The present invention provides a method for increasing yield, especially seed yield of plants, relative to control plants, which method comprises modulating expression in a plant of a nucleic acid encoding a bHLH9 polypeptide, or an IMB1 polypeptide, or a PCD polypeptide, as defined herein.

[0264] The present invention also provides a method for increasing yield-related traits of plants relative to control plants, which method comprises increasing expression in a plant of a nucleic acid sequence encoding a PRR2 polypeptide as defined herein.

[0265] Since the transgenic plants according to the present invention have increased yield and/or yield-related traits, it is likely that these plants exhibit an increased growth rate (during at least part of their life cycle), relative to the growth rate of control plants at a corresponding stage in their life cycle.

[0266] The increased growth rate may be specific to one or more parts of a plant (including seeds), or may be throughout substantially the whole plant. Plants having an increased growth rate may have a shorter life cycle. The life cycle of a plant may be taken to mean the time needed to grow from a dry mature seed up to the stage where the plant has produced dry mature seeds, similar to the starting material. This life cycle may be influenced by factors such as speed of germination, early vigour, growth rate, greenness index, flowering time and speed of seed maturation. The increase in growth rate may take place at one or more stages in the life cycle of a plant or during substantially the whole plant life cycle. Increased growth rate during the early stages in the life cycle of a plant may reflect enhanced vigour. The increase in growth rate may alter the harvest cycle of a plant allowing plants to be sown later and/or harvested sooner than would otherwise be possible (a similar effect may be obtained with earlier flowering time). If the growth rate is sufficiently increased, it may allow for the further sowing of seeds of the same plant species (for example sowing and harvesting of rice plants followed by sowing and harvesting of further rice plants all within one conventional growing period). Similarly, if the growth rate is sufficiently increased, it may allow for the further sowing of seeds of different plants species (for example the sowing and harvesting of corn plants followed by, for example, the sowing and optional harvesting of soybean, potato or any other suitable plant). Harvesting additional times from the same rootstock in the case of some crop plants may also be possible. Altering the harvest cycle of a plant may lead to an increase in annual biomass production per square meter (due to an increase in the number of times (say in a year) that any particular plant may be grown and harvested). An increase in growth rate may also allow for the cultivation of transgenic plants in a wider geographical area than their wild-type counterparts, since the territorial limitations for growing a crop are often determined by adverse environmental conditions either at the time of planting (early season) or at the time of harvesting (late season). Such adverse conditions may be avoided if the harvest cycle is shortened. The growth rate may be determined by deriving various parameters from growth curves, such parameters may be: T-Mid (the time taken for plants to reach 50% of their maximal size) and T-90 (time taken for plants to reach 90% of their maximal size), amongst others.

[0267] According to a preferred feature of the present invention, performance of the methods of the invention gives plants having an increased growth rate relative to control plants. Therefore, according to the present invention, there is provided a method for increasing the growth rate of plants, which method comprises modulating expression in a plant of a nucleic acid encoding a bHLH9 polypeptide, or an IMB1 polypeptide, or a PCD-like polypeptide, or a PRR2 polypeptide, as defined herein.

[0268] An increase in yield and/or growth rate and/or increased yield-related traits occur whether the plant is under non-stress conditions or whether the plant is exposed to various stresses compared to control plants grown under comparable conditions. Plants typically respond to exposure to stress by growing more slowly. In conditions of severe stress, the plant may even stop growing altogether. Mild stress on the other hand is defined herein as being any stress to which a plant is exposed which does not result in the plant ceasing to grow altogether without the capacity to resume growth. Mild stress in the sense of the invention leads to a reduction in the growth of the stressed plants of less than 40%, 35% or 30%, preferably less than 25%, 20% or 15%, more preferably less than 14%, 13%, 12%, 11% or 10% or less in comparison to the control plant under non-stress conditions. Due to advances in agricultural practices (irrigation, fertilization, and/or pesticide treatments) severe stresses are not often encountered in cultivated crop plants. As a consequence, the compromised growth induced by mild stress is often an undesirable feature for agriculture. Mild stresses are the everyday biotic and/or abiotic (environmental) stresses to which a plant is exposed. Abiotic stresses may be due to drought or excess water, anaerobic stress, salt stress, chemical toxicity, oxidative stress and hot, cold or freezing temperatures. The abiotic stress may be an osmotic stress caused by a water stress (particularly due to drought), salt stress, oxidative stress or an ionic stress. Biotic stresses are typically those stresses caused by pathogens, such as bacteria, viruses, fungi, nematodes, and insects. The term “non-stress” conditions as used herein are those environmental conditions that allow optimal growth of plants. Persons skilled in the art are aware of normal soil conditions and climatic conditions for a given location.

[0269] In particular, the methods of the present invention may be performed under non-stress conditions or under conditions of mild drought to give plants having increased yield relative to control plants. As reported in Wang et al. (Planta (2003) 218: 1-14), abiotic stress leads to a series of morphological, physiological, biochemical and molecular changes that adversely affect plant growth and productivity. Drought, salinity, extreme temperatures and oxidative stress are known to be interconnected and may induce growth and cellular damage through similar mechanisms. Rabbani et al. (Plant Physiol (2003) 133: 1755-1767) describes a particularly high degree of “cross talk” between drought stress and high-salinity stress. For example, drought and/or salinisation are manifested primarily as osmotic stress, resulting in the disruption of homeostasis and ion distribution in the cell. Oxidative stress, which frequently accompanies high or low temperature, salinity or drought stress, may cause denaturing of functional and structural proteins. As a consequence, these diverse environmental stresses often activate similar cell signalling pathways and cellular responses, such as the production of stress proteins, up-regulation of anti-oxidants, accumulation of compatible solutes and growth arrest. The term “non-stress” conditions as used herein are those environmental conditions that allow optimal growth of plants. Persons skilled in the art are aware of normal soil conditions and climatic conditions for a given location. Plants with optimal growth conditions, (grown under non-stress conditions) typically yield in increasing order of preference at least 97%, 95%, 92%, 90%, 87%, 85%, 83%, 80%, 77% or 75% of the average production of such plant in a given environment. Average production may be calculated on harvest and/or season basis. Persons skilled in the art are aware of average yield productions of a crop.

[0270] Performance of the methods of the invention gives plants grown under non-stress conditions or under mild drought conditions increased yield and/or yield-related traits relative to control plants grown under comparable conditions. Therefore, according to the present invention, there is provided a method for increasing yield in plants grown under non-stress conditions or under mild drought conditions, which method comprises modulating expression in a plant of a nucleic acid encoding a bHLH9 polypeptide, or an IMB1 polypeptide, or a PCD-like polypeptide, or a PRR2 polypeptide.

[0271] Performance of the methods of the invention gives plants grown under conditions of nutrient deficiency, particularly under conditions of nitrogen deficiency, increased yield relative to control plants grown under comparable conditions. Therefore, according to the present invention, there is provided a method for increasing yield in plants grown under conditions of nutrient deficiency, which method comprises modulating expression in a plant of a nucleic acid encoding a bHLH9 polypeptide, or an IMB1 polypeptide, or a PCD-like polypeptide. Nutrient deficiency may result from a lack of nutrients such as nitrogen, phosphates and other phosphorous-containing compounds, potassium, calcium, cadmium, magnesium, manganese, iron and boron, amongst others.

[0272] The term “abiotic stress” as defined herein is taken to mean any one or more of: water stress (due to drought or excess water), anaerobic stress, salt stress, temperature stress (due to hot, cold or freezing temperatures), chemical toxicity stress and oxidative stress. According to one aspect of the invention, the abiotic stress is an osmotic stress, selected from water stress, salt stress, oxidative stress and ionic stress. Preferably, the water stress is drought stress. The term salt stress is not restricted to common salt (NaCl), but may be any stress caused by one or more of: NaCl, KCl, LiCl, MgCl₂, CaCl₂, amongst others.

[0273] Performance of the methods of the invention gives plants grown under conditions of salt stress, increased yield relative to control plants grown under comparable conditions. Therefore, according to the present invention, there is provided a method for increasing yield in plants grown under conditions of salt stress, which method comprises modulating expression in a plant of a nucleic acid encoding a bHLH9 polypeptide, or an IMB1 polypeptide, or a PCD-like polypeptide. The term salt stress is not restricted to common salt (NaCl), but may be any one or more of: NaCl, KCl, LiCl, MgCl₂, CaCl₂, amongst others.

[0274] Performance of the methods of the invention gives plants having increased yield-related traits, under abiotic stress conditions relative to control plants grown in comparable stress conditions. Therefore, according to the present invention, there is provided a method for increasing yield-related traits, in plants grown under abiotic stress conditions, which method comprises increasing expression in a plant of a nucleic acid sequence encoding a PRR2 polypeptide. According to one aspect of the invention, the abiotic stress is an osmotic stress, selected from one or more of the following: water stress, salt stress, oxidative stress and ionic stress.

[0275] Another example of abiotic environmental stress is the reduced availability of one or more nutrients that need to be assimilated by the plants for growth and development. Because of the strong influence of nutrition utilization efficiency on plant yield and product quality, a huge amount of fertilizer is poured onto fields to optimize plant growth and quality. Productivity of plants ordinarily is limited by three primary nutrients, phosphorous, potassium and nitrogen, which is usually the rate-limiting element in plant growth of these three. Therefore the major nutritional element required for plant growth is nitrogen (N). It is a constituent of numerous important compounds found in living cells, including amino acids, proteins (enzymes), nucleic acids, and chlorophyll. 1.5% to 2% of plant dry matter is nitrogen and approximately 16% of total plant protein. Thus, nitrogen availability is a major limiting factor for crop plant growth and production (Frink et al. (1999) Proc Natl Acad Sci USA 96(4): 1175-1180), and has as well a major impact on protein accumulation and amino acid composition. Therefore, of great interest are crop plants with increased yield-related traits, when grown under nitrogen-limiting conditions.

[0276] Performance of the methods of the invention gives plants grown under conditions of reduced nutrient availability, particularly under conditions of reduced nitrogen availablity, having increased yield-related traits relative to control plants grown under comparable conditions. Therefore, according to the present invention, there is provided a method for increasing yield-related traits in plants grown under conditions of reduced nutrient availablity, preferably reduced nitrogen availability, which method comprises increasing expression in a plant of a nucleic acid sequence encoding a PRR2 polypeptide. Reduced nutrient availability may result from a deficiency or excess of nutrients such as nitrogen, phosphates and other phosphorous-containing compounds, potassium, calcium, cadmium, magnesium, manganese, iron and boron, amongst others. Preferably, reduced nutrient availablity is reduced nitrogen availability.

[0277] The present invention encompasses plants or parts thereof (including seeds) or cells thereof obtainable by the methods according to the present invention. The plants or parts thereof or cells thereof comprise a nucleic acid transgene encoding a bHLH9 polypeptide, or an IMB1 polypeptide, or a PCD-like polypeptide, or a PRR2 polypeptide, as defined above, operably linked to a promoter functioning in plants.

[0278] The invention also provides genetic constructs and vectors to facilitate introduction and/or expression in plants of nucleic acids encoding bHLH9 polypeptides, or IMB1 polypeptides, or PCD-like polypeptides, or PRR2 polypeptides. The gene constructs may be inserted into vectors, which may be commercially available, suitable for transforming into plants and suitable for expression of the gene of interest in the transformed cells. The invention also provides use of a gene construct as defined herein in the methods of the invention.

[0279] More specifically, the present invention provides a construct comprising:
[0280] (a) a nucleic acid encoding a bHLH9 polypeptide, or an IMB1 polypeptide, or a PCD-like polypeptide, or a PRR2 polypeptide, as defined above;
[0281] (b) one or more control sequences capable of driving expression of the nucleic acid sequence of (a); and optionally
[0282] (c) a transcription termination sequence.

[0283] Preferably, the nucleic acid encoding a bHLH9 polypeptide, or an IMB1 polypeptide, or a PCD-like polypeptide, or a PRR2 polypeptide, is as defined above. The term “control sequence” and “termination sequence” are as defined herein.

[0284] Concerning PRR2 polypeptides, preferably, one of the control sequences of a construct is a consitituve promoter isolated from a plant genome. An example of a constitutive promoter is a GOS2 promoter, preferably a GOS2 promoter from rice, most preferably a GOS2 sequence as represented by SEQ ID NO: 478.

[0285] Plants are transformed with a vector comprising any of the nucleic acids described above. The skilled artisan is well aware of the genetic elements that must be present on the vector in order to successfully transform, select and propagate host cells containing the sequence of interest. The sequence of interest is operably linked to one or more control sequences (at least to a promoter).

[0286] Advantageously, any type of promoter, whether natural or synthetic, may be used to drive expression of the nucleic acid sequence, but preferably the promoter is of plant origin. A constitutive promoter is particularly useful in the methods. Preferably the constitutive promoter is also a ubiquitous promoter of medium strength. See the “Definitions” section herein for definitions of the various promoter types.

[0287] Concerning PRR2 polypeptides, advantageously, any type of promoter, whether natural or synthetic, may be used to increase expression of the nucleic acid sequence. A constitutive promoter is particularly useful in the methods, preferably a constitutive promoter isolated from a plant genome. The plant constitutive promoter drives expression of a coding sequence at a level that is in all instances below that obtained under the control of a 35S CaMV viral promoter. An example of such a promoter is a GOS2 promoter as represented by SEQ ID NO: 478.

[0288] Concerning PRR2 polypeptides, organ-specific promoters, for example for preferred expression in leaves, stems, tubers, meristems, seeds, are useful in performing the methods of the invention. Developmentally-regulated and inducible promoters are also useful in performing the methods of the invention. See the “Definitions” section herein for definitions of the various promoter types.

[0289] Concerning bHLH9 polypeptides, it should be clear that the applicability of the present invention is not restricted to the bHLH9 polypeptide-encoding nucleic acid represented by SEQ ID NO: 1, nor is the applicability of the invention restricted to expression of a bHLH9 polypeptide-encoding nucleic acid when driven by a constitutive promoter.

[0290] The constitutive promoter is preferably a medium strength promoter, more preferably selected from a plant derived promoter, such as a GOS2 promoter, more preferably is the promoter GOS2 promoter from rice. Further preferably the constitutive promoter is represented by a nucleic acid sequence substantially similar to SEQ ID NO: 275, most preferably the constitutive promoter is as represented by SEQ ID NO: 275. See the “Definitions” section herein for further examples of constitutive promoters.

[0291] Concerning IMB1 polypeptides, it should be clear that the applicability of the present invention is not restricted to the IMB1 polypeptide-encoding nucleic acid represented by SEQ ID NO: 300, nor is the applicability of the invention restricted to expression of an IMB1 polypeptide-encoding nucleic acid when driven by a constitutive promoter.

[0292] The constitutive promoter is preferably a medium strength promoter, more preferably a plant derived medium strength promoter, such as a GOS2 promoter, most preferably the promoter is the GOS2 promoter from rice. Further preferably the constitutive promoter is represented by a nucleic acid sequence substantially similar to SEQ ID NO: 313, most preferably the constitutive promoter is as represented by SEQ ID NO: 313. See the “Definitions” section herein for further examples of constitutive promoters.

[0293] Optionally, one or more terminator sequences may be used in the construct introduced into a plant. Preferably, the construct comprises an expression cassette comprising the rice GOS2 promoter, operably linked to the nucleic acid encoding the IMB1 polypeptide.

[0294] Concerning PCD-like polypeptides, it should be clear that the applicability of the present invention is not restricted to the PCD polypeptide-encoding nucleic acid represented by SEQ ID NO: 358, nor is the applicability of the invention restricted to expression of a PCD-like polypeptide-encoding nucleic acid when driven by a constitutive promoter.

[0295] The constitutive promoter is preferably a medium strength promoter, more preferably selected from a plant derived promoter, such as a GOS2 promoter, more preferably is the promoter GOS2 promoter from rice. Further preferably the constitutive promoter is represented by a nucleic acid sequence substantially similar to SEQ ID NO: 450, most preferably the constitutive promoter is as represented by SEQ ID NO: 450. See the “Definitions” section herein for further examples of constitutive promoters.

[0296] Concerning PRR2 polypeptides, it should be clear that the applicability of the present invention is not restricted to a nucleic acid sequence encoding the PRR2 polypeptide, as represented by SEQ ID NO: 451, nor is the applicability of the invention restricted to expression of a PRR2 polypeptide-encoding nucleic acid sequence when driven by a constitituve promoter. Optionally, one or more terminator sequences may be used in the construct introduced into a plant.

[0297] Additional regulatory elements may include transcriptional as well as translational increasers. Those skilled in the art will be aware of terminator and increaser sequences that may be suitable for use in performing the invention. An intron sequence may also be added to the 5′ untranslated region (UTR) or in the coding sequence to increase the amount of the mature message that accumulates in the cytosol, as described in the definitions section. Other control sequences (besides promoter, increaser, silencer, intron sequences, 3′UTR and/or 5′UTR regions) may be protein and/or RNA stabilizing elements. Such sequences would be known or may readily be obtained by a person skilled in the art.

[0298] The genetic constructs of the invention may further include an origin of replication sequence that is required for maintenance and/or replication in a specific cell type. One example is when a genetic construct is required to be maintained in a bacterial cell as an episomal genetic element (e.g. plasmid or cosmid molecule). Preferred origins of replication include, but are not limited to, the f1-ori and colE1.

[0299] For the detection of the successful transfer of the nucleic acid sequences as used in the methods of the invention and/or selection of transgenic plants comprising these nucleic acids, it is advantageous to use marker genes (or reporter genes). Therefore, the genetic construct may optionally comprise a selectable marker gene. Selectable markers are described in more detail in the “definitions” section herein. The marker genes may be removed or excised from the transgenic cell once they are no longer needed. Techniques for marker removal are known in the art, useful techniques are described above in the definitions section.

[0300] It is known that upon stable or transient integration of nucleic acid sequences into plant cells, only a minority of the cells takes up the foreign DNA and, if desired, integrates it into its genome, depending on the expression vector used and the transfection technique used. To identify and select these integrants, a gene coding for a selectable marker (such as the ones described above) is usually introduced into the host cells together with the gene of interest. These markers can for example be used in mutants in which these genes are not functional by, for example, deletion by conventional methods. Furthermore, nucleic acid sequence molecules encoding a selectable marker can be introduced into a host cell on the same vector that comprises the sequence encoding the polypeptides of the invention or used in the methods of the invention, or else in a separate vector. Cells which have been stably transfected with the introduced nucleic acid sequence can be identified for example by selection (for example, cells which have integrated the selectable marker survive whereas the other cells die). The marker genes may be removed or excised from the transgenic cell once they are no longer needed. Techniques for marker gene removal are known in the art, useful techniques are described above in the definitions section.

[0301] The invention also provides a method for the production of transgenic plants having enhanced yield-related traits relative to control plants, comprising introduction and expression in a plant of any nucleic acid encoding a bHLH9 polypeptide, or an IMB1 polypeptide, or a PCD-like polypeptide, or a PRR2 polypeptide, as defined hereinabove.

[0302] Concerning bHLH9 polypeptides, more specifically, the present invention provides a method for the production of transgenic plants having enhanced yield-related traits, particularly increased early vigour and/or increased biomass and/or increased seed yield relative to control plants, comprising:
[0303] (i) introducing and expressing in a plant a nucleic acid encoding a bHLH9 polypeptide; and
[0304] (ii) cultivating the plant cell under conditions promoting plant growth and development; and optionally
[0305] (iii) selecting for plants having increased yield.

[0306] The nucleic acid of (i) may be any of the nucleic acids capable of encoding a bHLH9 polypeptide as defined herein.

[0307] Concerning IMB1 polypeptides, more specifically, the present invention provides a method for the production of transgenic plants having enhanced yield-related traits, particularly increased (seed) yield, which method comprises:
[0308] (i) introducing and expressing in a plant or plant cell an IMB1 polypeptide-encoding nucleic acid; and
[0309] (ii) cultivating the plant cell under conditions promoting plant growth and development.

[0310] The nucleic acid of (i) may be any of the nucleic acids capable of encoding an IMB1 polypeptide as defined herein.

[0311] Concerning PCD-like polypeptides, more specifically, the present invention provides a method for the production of transgenic plants having enhanced yield-related traits, particularly increased (seed) yield, which method comprises:
[0312] (i) introducing and expressing in a plant or plant cell a PCD-like polypeptide-encoding nucleic acid; and
[0313] (ii) cultivating the plant cell under conditions promoting plant growth and development.

[0314] The nucleic acid of (i) may be any of the nucleic acids capable of encoding a PCD-like polypeptide as defined herein.

[0315] Concerning PRR2 polypeptides, more specifically, the present invention provides a method for the production of transgenic plants having increased yield-related traits relative to control plants, which method comprises:
[0316] (i) introducing and expressing in a plant, plant part, or plant cell a nucleic acid sequence encoding a PRR2 polypeptide; and
[0317] (ii) cultivating the plant cell, plant part or plant under conditions promoting plant growth and development.

[0318] The nucleic acid sequence of (i) may be any of the nucleic acid sequences capable of encoding a PRR2 polypeptide as defined herein.

[0319] The nucleic acid may be introduced directly into a plant cell or into the plant itself (including introduction into a tissue, organ or any other part of a plant). According to a preferred feature of the present invention, the nucleic acid is preferably introduced into a plant by transformation. The term “transformation” is described in more detail in the “definitions” section herein.

[0320] The genetically modified plant cells can be regenerated via all methods with which the skilled worker is familiar. Suitable methods can be found in the above-mentioned publications by S. D. Kung and R. Wu, Potrykus or Hofgen and Willmitzer.

[0321] Generally after transformation, plant cells or cell groupings are selected for the presence of one or more markers which are encoded by plant-expressible genes co-transferred with the gene of interest, following which the transformed material is regenerated into a whole plant. To select transformed plants, the plant material obtained in the transformation is, as a rule, subjected to selective conditions so that transformed plants can be distinguished from untransformed plants. For example, the seeds obtained in the above-described manner can be planted and, after an initial growing period, subjected to a suitable selection by spraying. A further possibility consists in growing the seeds, if appropriate after sterilization, on agar plates using a suitable selection agent so that only the transformed seeds can grow into plants. Alternatively, the transformed plants are screened for the presence of a selectable marker such as the ones described above.

[0322] Following DNA transfer and regeneration, putatively transformed plants may also be evaluated, for instance using Southern analysis, for the presence of the gene of interest, copy number and/or genomic organisation. Alternatively or additionally, expression levels of the newly introduced DNA may be monitored using Northern and/or Western analysis, both techniques being well known to persons having ordinary skill in the art.

[0323] The generated transformed plants may be propagated by a variety of means, such as by clonal propagation or classical breeding techniques. For example, a first generation (or T1) transformed plant may be selfed and homozygous second-generation (or T2) transformants selected, and the T2 plants may then further be propagated through classical breeding techniques. The generated transformed organisms may take a variety of forms. For example, they may be chimeras of transformed cells and non-transformed cells; clonal transformants (e.g., all cells transformed to contain the expression cassette); grafts of transformed and untransformed tissues (e.g., in plants, a transformed rootstock grafted to an untransformed scion).

[0324] The present invention clearly extends to any plant cell or plant produced by any of the methods described herein, and to all plant parts and propagules thereof. The present invention extends further to encompass the progeny of a primary transformed or transfected cell, tissue, organ or whole plant that has been produced by any of the aforementioned methods, the only requirement being that progeny exhibit the same genotypic and/or phenotypic characteristic(s) as those produced by the parent in the methods according to the invention.

[0325] The invention also includes host cells containing an isolated nucleic acid encoding a bHLH9 polypeptide, or an IMB1 polypeptide, or a PCD-like polypeptide, or a PRR2 polypeptide, as defined hereinabove. Preferred host cells according to the invention are plant cells. Host plants for the nucleic acids or the vector used in the method according to the invention, the expression cassette or construct or vector are, in principle, advantageously all plants, which are capable of synthesizing the polypeptides used in the inventive method.

[0326] The methods of the invention are advantageously applicable to any plant. Plants that are particularly useful in the methods of the invention include all plants which belong to the superfamily Viridiplantae, in particular monocotyledonous and dicotyledonous plants including fodder or forage legumes, ornamental plants, food crops, trees or shrubs. According to a preferred embodiment of the present invention, the plant is a crop plant. Examples of crop plants include soybean, sunflower, canola, alfalfa, rapeseed, linseed, cotton, tomato, potato and tobacco. Further preferably, the plant is a monocotyledonous plant. Examples of monocotyledonous plants include sugarcane. More preferably the plant is a cereal. Examples of cereals include rice, maize, wheat, barley, millet, rye, triticale, sorghum, emmer, spelt, secale, einkorn, teff, milo and oats.

[0327] The invention also extends to harvestable parts of a plant such as, but not limited to seeds, leaves, fruits, flowers, stems, roots, rhizomes, tubers and bulbs, which harvestable parts comprise a recombinant nucleic acid encoding a bHLH9 polypeptide, or an IMB1 polypeptide, or a PCD-like polypeptide, or a PRR2 polypeptide. The invention furthermore relates to products derived, preferably directly derived, from a harvestable part of such a plant, such as dry pellets or powders, oil, fat and fatty acids, starch or proteins.

[0328] According to a preferred feature of the invention, the modulated expression is increased expression. Methods for increasing expression of nucleic acids or genes, or gene products, are well documented in the art and examples are provided in the definitions section.

[0329] As mentioned above, a preferred method for modulating expression of a nucleic acid encoding a bHLH9 polypeptide, or an IMB1 polypeptide, or a PCD-like polypeptide, or a PRR2 polypeptide, is by introducing and expressing in a plant a nucleic acid encoding a bHLH9 polypeptide, or an IMB1 polypeptide, or a PCD-like polypeptide, or a PRR2 polypeptide; however the effects of performing the method, i.e. enhancing yield-related traits may also be achieved using other well known techniques, including but not limited to T-DNA activation tagging, TILLING, homologous recombination. A description of these techniques is provided in the definitions section.

[0330] The present invention also encompasses use of nucleic acids encoding bHLH9 polypeptides as described herein and use of these bHLH9 polypeptides, or IMB1 polypeptides, or PCD-like polypeptides, in enhancing any of the aforementioned yield-related traits in plants.

[0331] The present invention also encompasses use of nucleic acid sequences encoding PRR2 polypeptides as described herein and use of these PRR2 polypeptides in increasing any of the aforementioned yield-related traits in plants, under normal growth conditions, under abiotic stress growth (preferably osmotic stress growth conditions) conditions, and under growth conditions of reduced nutrient availability, preferably under conditions of reduced nitrogen availability.

[0332] Nucleic acids encoding bHLH9 polypeptides, or IMB1 polypeptides, or PCD-like polypeptides, or PRR2 polypeptides, described herein, or the bHLH9 polypeptides themselves, may find use in breeding programmes in which a DNA marker is identified which may be genetically linked to a gene encoding a bHLH9 polypeptide, or an IMB1 polypeptide, or a PCD-like polypeptide, or a PRR2 polypeptide. The nucleic acids/genes, or the bHLH9 polypeptides, or IMB1 polypeptides, or PCD-like polypeptides, or PRR2 polypeptides, themselves may be used to define a molecular marker. This DNA or protein marker may then be used in breeding programmes to select plants having enhanced yield-related traits as defined hereinabove in the methods of the invention.

[0333] Allelic variants of a nucleic acid/gene encoding a bHLH9 polypeptide, or an IMB1 polypeptide, or a PCD-like polypeptide, or a PRR2 polypeptide, may also find use in marker-assisted breeding programmes. Such breeding programmes sometimes require introduction of allelic variation by mutagenic treatment of the plants, using for example EMS mutagenesis; alternatively, the programme may start with a collection of allelic variants of so called “natural” origin caused unintentionally. Identification of allelic variants then takes place, for example, by PCR. This is followed by a step for selection of superior allelic variants of the sequence in question and which give increased yield. Selection is typically carried out by monitoring growth performance of plants containing different allelic variants of the sequence in question. Growth performance may be monitored in a greenhouse or in the field. Further optional steps include crossing plants in which the superior allelic variant was identified with another plant. This could be used, for example, to make a combination of interesting phenotypic features.

[0334] Nucleic acids encoding bHLH9 polypeptides, or IMB1 polypeptides, or PCD-like polypeptides, or PRR2 polypeptides, may also be used as probes for genetically and physically mapping the genes that they are a part of, and as markers for traits linked to those genes. Such information may be useful in plant breeding in order to develop lines with desired phenotypes. Such use of nucleic acids encoding bHLH9 polypeptides, or IMB1 polypeptides, or PCD-like polypeptides, or PRR2 polypeptides, requires only a nucleic acid sequence of at least 15 nucleotides in length. The nucleic acids encoding bHLH9 polypeptides, or IMB1 polypeptides, or PCD-like polypeptides, or PRR2 polypeptides, may be used as restriction fragment length polymorphism (RFLP) markers. Southern blots (Sambrook J, Fritsch E F and Maniatis T (1989) Molecular Cloning, A Laboratory Manual) of restriction-digested plant genomic DNA may be probed with the nucleic acids encoding bHLH9 polypeptides, or IMB1 polypeptides, or PCD-like polypeptides, or PRR2 polypeptides. The resulting banding patterns may then be subjected to genetic analyses using computer programs such as MapMaker (Lander et al. (1987) Genomics 1: 174-181) in order to construct a genetic map. In addition, the nucleic acids may be used to probe Southern blots containing restriction endonuclease-treated genomic DNAs of a set of individuals representing parent and progeny of a defined genetic cross. Segregation of the DNA polymorphisms is noted and used to calculate the position of the nucleic acid encoding bHLH9 polypeptides, or IMB1 polypeptides, or PCD-like polypeptides, or PRR2 polypeptides, in the genetic map previously obtained using this population (Botstein et al. (1980) Am. J. Hum. Genet. 32:314-331).

[0335] The production and use of plant gene-derived probes for use in genetic mapping is described in Bernatzky and Tanksley (1986) Plant Mol. Biol. Reporter 4: 37-41. Numerous publications describe genetic mapping of specific cDNA clones using the methodology outlined above or variations thereof. For example, F2 intercross populations, backcross populations, randomly mated populations, near isogenic lines, and other sets of individuals may be used for mapping. Such methodologies are well known to those skilled in the art.

[0336] The nucleic acid probes may also be used for physical mapping (i.e., placement of sequences on physical maps; see Hoheisel et al. In: Non-mammalian Genomic Analysis: A Practical Guide, Academic press 1996, pp. 319-346, and references cited therein).

[0337] In another embodiment, the nucleic acid probes may be used in direct fluorescence in situ hybridisation (FISH) mapping (Trask (1991) Trends Genet. 7:149-154). Although current methods of FISH mapping favour use of large clones (several kb to several hundred kb; see Laan et al. (1995) Genome Res. 5:13-20), improvements in sensitivity may allow performance of FISH mapping using shorter probes.

[0338] A variety of nucleic acid amplification-based methods for genetic and physical mapping may be carried out using the nucleic acids. Examples include allele-specific amplification (Kazazian (1989) J. Lab. Clin. Med. 11:95-96), polymorphism of PCR-amplified fragments (CAPS; Sheffield et al. (1993) Genomics 16:325-332), allele-specific ligation (Landegren et al. (1988) Science 241:1077-1080), nucleotide extension reactions (Sokolov (1990) Nucleic Acid Res. 18:3671), Radiation Hybrid Mapping (Walter et al. (1997) Nat. Genet. 7:22-28) and Happy Mapping (Dear and Cook (1989) Nucleic Acid Res. 17:6795-6807). For these methods, the sequence of a nucleic acid is used to design and produce primer pairs for use in the amplification reaction or in primer extension reactions. The design of such primers is well known to those skilled in the art. In methods employing PCR-based genetic mapping, it may be necessary to identify DNA sequence differences between the parents of the mapping cross in the region corresponding to the instant nucleic acid sequence. This, however, is generally not necessary for mapping methods.

[0339] Concerning bHLH9 polypeptides, or IMB1 polypeptides, or PCD-like poypeptides, the methods according to the present invention result in plants having enhanced yield-related traits, as described hereinbefore. These traits may also be combined with other economically advantageous traits, such as further yield-enhancing traits, tolerance to other abiotic and biotic stresses, traits modifying various architectural features and/or biochemical and/or physiological features.

[0340] Concerning PRR2 polypeptides, the methods according to the present invention result in plants having increased yield-related traits, as described hereinbefore. These traits may also be combined with other economically advantageous traits, such as further yield-increasing traits, tolerance to abiotic and biotic stresses, tolerance to herbicides, insectides, traits modifying various architectural features and/or biochemical and/or physiological features.

### Items

[0341] The present invention will now be described in reference to the following items:

1. basic-Helix-Loop-Helix Group 9 (bHLH9)
[0342] 1. A method for enhancing yield-related traits in plants relative to control plants, comprising modulating expression in a plant of a nucleic acid encoding a bHLH9 (basic-Helix-Loop-Helix group 9) polypeptide comprising an HLH domain (Pfam accession number: PF00010) having in increasing order of preference at least 80%, 81%, 82%, 83%, 84%, 85%, 86%, 87%, 88%, 89%, 90%, 91%, 92%, 93%, 94%, 95%, 96%, 97%, 98%, 99% or 100% sequence identity to any of SEQ ID NO: 181 to SEQ ID NO: 268, preferably to SEQ ID NO: 225.
[0343] 2. Method according to item 1, wherein said bHLH9 binds to an E-box motif as represented in increasing order of preference by SEQ ID NO: 273 (CANNTG) or SEQ ID NO: 274 (CACGTG).
[0344] 3. Method according to item 1 or 2, wherein said modulated expression is effected by introducing and expressing in a plant a nucleic acid encoding a bHLH9 polypeptide.
[0345] 4. Method according to any one of items 1 to 3, wherein said nucleic acid encoding a bHLH9 polypeptide encodes any one of the proteins listed in Table A1 or is a portion of such a nucleic acid, or a nucleic acid capable of hybridising with such a nucleic acid.
[0346] 5. Method according to any one of items 1 to 4, wherein said nucleic acid sequence encodes an orthologue or paralogue of any of the proteins given in Table A1.
[0347] 6. Method according to any preceding item, wherein said enhanced yield-related traits comprise increased yield, preferably increased early vigour and/or increased biomass and/or increased seed yield relative to control plants.
[0348] 7. Method according to any one of items 1 to 6, wherein said enhanced yield-related traits are obtained under non-stress conditions.
[0349] 8. Method according to any one of items 1 to 6, wherein said enhanced yield-related traits are obtained under conditions of drought stress, salt stress or nitrogen deficiency.
[0350] 9. Method according to any one of items 3 to 8, wherein said nucleic acid is operably linked to a constitutive promoter, preferably to a GOS2 promoter, most preferably to a GOS2 promoter from rice.
[0351] 10. Method according to any one of items 1 to 9, wherein said nucleic acid encoding a bHLH9 polypeptide is of plant origin, preferably from a monocotyledonous plant, further preferably from the family Poaceae, more preferably from the genus Oryza, most preferably from Oryza sativa.
[0352] 11. Plant or part thereof, including seeds, obtainable by a method according to any one of items 1 to 10, wherein said plant or part thereof comprises a recombinant nucleic acid encoding a bHLH9 polypeptide.
[0353] 12. Construct comprising:
   [0354] (i) nucleic acid encoding a bHLH9 polypeptide as defined in items 1 or 2;
   [0355] (ii) one or more control sequences capable of driving expression of the nucleic acid sequence of (a); and optionally
   [0356] (iii) a transcription termination sequence.
[0357] 13. Construct according to item 12, wherein one of said control sequences is a constitutive promoter, preferably a GOS2 promoter, most preferably a GOS2 promoter from rice.
[0358] 14. Use of a construct according to item 12 or 13 in a method for making plants having increased yield, particularly increased early vigour and/or increased biomass and/or increased seed yield relative to control plants.
[0359] 15. Plant, plant part or plant cell transformed with a construct according to item 12 or 13.
[0360] 16. Method for the production of a transgenic plant having increased yield, particularly increased early vigour and/or increased biomass and/or increased seed yield relative to control plants, comprising:
   [0361] (i) introducing and expressing in a plant a nucleic acid encoding a bHLH9 polypeptide as defined in item 1 or 2; and
   [0362] (ii) cultivating the plant cell under conditions promoting plant growth and development; and optionally
   [0363] (iii) selecting for plants having increased yield.
[0364] 17. Transgenic plant having increased yield, particularly increased early vigour and/or increased biomass and/or increased seed yield, relative to control plants, resulting from modulated expression of a nucleic acid encoding a bHLH9 polypeptide as defined in item 1 or 2, or a transgenic plant cell derived from said transgenic plant.
[0365] 18. Transgenic plant according to item 11, 15 or 17, or a transgenic plant cell derived thereof, wherein said plant is a crop plant or a monocot or a cereal, such as rice, maize, wheat, barley, millet, rye, triticale, sorghum emmer, spelt, secale, einkorn, teff, milo and oats.
[0366] 19. Harvestable parts of a plant according to item 18, wherein said harvestable parts are preferably shoot biomass and/or seeds.
[0367] 20. Products derived from a plant according to item 18 and/or from harvestable parts of a plant according to item 19.
[0368] 21. Use of a nucleic acid encoding a bHLH9 polypeptide in increasing yield, particularly in increasing early vigour and/or in increasing biomass and/or increasing seed yield in plants, relative to control plants.
[0369] 22. An isolated nucleic acid molecule selected from:
   [0370] (i) a nucleic acid represented by any one of SEQ ID NO: 19, 45, 47, 165, 167 and 169;
   [0371] (ii) the complement of a nucleic acid represented by any one of SEQ ID NO: 19, 45, 47, 165, 167 and 169;
   [0372] (iii) a nucleic acid encoding the polypeptide as represented by any one of SEQ ID NO: 20, 46, 48, 166, 168 and 170, preferably as a result of the degeneracy of the genetic code, said isolated nucleic acid can be derived from a polypeptide sequence as represented by any one of SEQ ID NO: 20, 46, 48, 166, 168 and 170 and further preferably confers enhanced yield-related traits relative to control plants;
   [0373] (iv) a nucleic acid having, in increasing order of preference at least 30%, 31%, 32%, 33%, 34%, 35%, 36%, 37%, 38%, 39%, 40%, 41%, 42%, 43%, 44%, 45%, 46%, 47%, 48%, 49%, 50%, 51%, 52%, 53%, 54%, 55%, 56%, 57%, 58%, 59%, 60%, 61%, 62%, 63%, 64%, 65%, 66%, 67%, 68%, 69%, 70%, 71%, 72%, 73%, 74%, 75%, 76%, 77%, 78%, 79%, 80%, 81%, 82%, 83%, 84%, 85%, 86%, 87%, 88%, 89%, 90%, 91%, 92%, 93%, 94%, 95%, 96%, 97%, 98%, or 99% sequence identity with any of the nucleic acid sequences of Table A 1 and Table C2 and further preferably conferring enhanced yield-related traits relative to control plants;
   [0374] (v) a nucleic acid molecule which hybridizes with a nucleic acid molecule of (i) to (iv) under stringent hybridization conditions and preferably confers enhanced yield-related traits relative to control plants;
   [0375] (vi) a nucleic acid encoding a bHLH9 polypeptide having, in increasing order of preference, at least 50%, 51%, 52%, 53%, 54%, 55%, 56%, 57%, 58%, 59%, 60%, 61%, 62%, 63%, 64%, 65%, 66%, 67%, 68%, 69%, 70%, 71%, 72%, 73%, 74%, 75%, 76%, 77%, 78%, 79%, 80%, 81%, 82%, 83%, 84%, 85%, 86%, 87%, 88%, 89%, 90%, 91%, 92%, 93%, 94%, 95%, 96%, 97%, 98%, or 99% sequence identity to the amino acid sequence represented by any one of SEQ ID NO: 20, 46, 48, 166, 168, 170 and any of the other amino acid sequences in Table A and Table C2 and preferably conferring enhanced yield-related traits relative to control plants.
[0376] 23. An isolated polypeptide selected from:
   [0377] (i) an amino acid sequence represented by any one of SEQ ID NO: 20, 46, 48, 166, 168 and 170;
   [0378] (ii) an amino acid sequence having, in increasing order of preference, at least 50%, 51%, 52%, 53%, 54%, 55%, 56%, 57%, 58%, 59%, 60%, 61%, 62%, 63%, 64%, 65%, 66%, 67%, 68%, 69%, 70%, 71%, 72%, 73%, 74%, 75%, 76%, 77%, 78%, 79%, 80%, 81%, 82%, 83%, 84%, 85%, 86%, 87%, 88%, 89%, 90%, 91%, 92%, 93%, 94%, 95%, 96%, 97%, 98%, or 99% sequence identity to the amino acid sequence represented by any one of SEQ ID NO: 20, 46, 48, 166, 168 and 170, and any of the other amino acid sequences in Table A1 and Table C2 and preferably conferring enhanced yield-related traits relative to control plants.
   [0379] (iii) derivatives of any of the amino acid sequences given in (i) or (ii) above.

### 2. Imbibition-Inducible 1 (IMB1)

[0380] 1. A method for enhancing yield-related traits in plants relative to control plants, comprising modulating expression in a plant of a nucleic acid encoding an IMB1 polypeptide, wherein said IMB1 polypeptide comprises a single bromodomain.
[0381] 2. Method according to item 1, wherein said IMB1 polypeptide comprises one or more of the following motifs: Motif 3 (SEQ ID NO: 304), Motif 4 (SEQ ID NO: 305), Motif 5 (SEQ ID NO: 306), and Motif 6 (SEQ ID NO: 307).
[0382] 3. Method according to item 2, wherein said IMB1 polypeptide additionally comprises one or more of the following motifs: Motif 7 (SEQ ID NO: 308), Motif 8 (SEQ ID NO: 309), Motif 9 (SEQ ID NO: 310), Motif 10 (SEQ ID NO: 311), and Motif 11 (SEQ ID NO: 312).
[0383] 4. Method according to any of items 1 to 3, wherein said modulated expression is effected by introducing and expressing in a plant a nucleic acid encoding an IMB1 polypeptide.
[0384] 5. Method according to any one of items 1 to 4, wherein said nucleic acid encoding an IMB1 polypeptide encodes any one of the proteins listed in Table A2 or is a portion of such a nucleic acid, or a nucleic acid capable of hybridising with such a nucleic acid.
[0385] 6. Method according to any one of items 1 to 5, wherein said nucleic acid sequence encodes an orthologue or paralogue of any of the proteins given in Table A2.
[0386] 7. Method according to any preceding item, wherein said enhanced yield-related traits comprise increased yield, preferably increased biomass and/or increased seed yield relative to control plants.
[0387] 8. Method according to any one of items 1 to 7, wherein said enhanced yield-related traits are obtained under non-stress conditions.
[0388] 9. Method according to any one of items 4 to 8, wherein said nucleic acid is operably linked to a constitutive promoter, preferably to a GOS2 promoter, most preferably to a GOS2 promoter from rice.
[0389] 10. Method according to any one of items 1 to 9, wherein said nucleic acid encoding an IMB1 polypeptide is of plant origin, preferably from a dicotyledonous plant, further preferably from the family Solanaceae, more preferably from the genus Solanum, most preferably from Solanum lycopersicon.
[0390] 11. Plant or part thereof, including seeds, obtainable by a method according to any one of items 1 to 10, wherein said plant or part thereof comprises a recombinant nucleic acid encoding an IMB1 polypeptide.
[0391] 12. Construct comprising:
   [0392] (i) nucleic acid encoding an IMB1 polypeptide as defined in any of items 1 to 3;
   [0393] (ii) one or more control sequences capable of driving expression of the nucleic acid sequence of (a); and optionally
   [0394] (iii) a transcription termination sequence.
[0395] 13. Construct according to item 12, wherein one of said control sequences is a medium strength constitutive promoter, preferably a GOS2 promoter, most preferably a GOS2 promoter from rice.
[0396] 14. Use of a construct according to item 12 or 13 in a method for making plants having increased yield, particularly increased seed yield relative to control plants.
[0397] 15. Plant, plant part or plant cell transformed with a construct according to item 12 or 13.
[0398] 16. Method for the production of a transgenic plant having increased yield, particularly increased biomass and/or increased seed yield relative to control plants, comprising:
   [0399] (i) introducing and expressing in a plant a nucleic acid encoding an IMB1 polypeptide as defined in any of items 1 to 3; and
   [0400] (ii) cultivating the plant cell under conditions promoting plant growth and development.
[0401] 17. Transgenic plant having increased yield, particularly increased biomass and/or increased seed yield, relative to control plants, resulting from modulated expression of a nucleic acid encoding an IMB1 polypeptide as defined in any of items 1 to 3, or a transgenic plant cell derived from said transgenic plant.
[0402] 18. Transgenic plant according to item 11, 15 or 17, or a transgenic plant cell derived thereof, wherein said plant is a crop plant or a monocot or a cereal, such as rice, maize, wheat, barley, millet, rye, triticale, sorghum emmer, spelt, secale, einkorn, teff, milo and oats.
[0403] 19. Harvestable parts of a plant according to item 18, wherein said harvestable parts are preferably shoot biomass and/or seeds.
[0404] 20. Products derived from a plant according to item 18 and/or from harvestable parts of a plant according to item 19.
[0405] 21. Use of a nucleic acid encoding an IMB1 polypeptide in increasing yield, particularly in increasing seed yield and/or shoot biomass in plants, relative to control plants.

### 3. PCD-Like

[0406] 1. A method for enhancing yield-related traits in plants relative to control plants, comprising modulating expression in a plant of a nucleic acid encoding a PCD polypeptide comprising a Pterin-4-alpha-carbinolamine dehydratase (PCD) domain (Interpro accession number: IPR001533; pfam accession number: PF01329), said PCD domain preferably having in increasing order of preference at least 50%, 51%, 52%, 53%, 54%, 55%, 56%, 57%, 58%, 59%, 60%, 61%, 62%, 63%, 64%, 65%, 66%, 67%, 68%, 69%, 70%, 71%, 72%, 73%, 74%, 75%, 76%, 77%, 78%, 79%, 80%, 81%, 82%, 83%, 84%, 85%, 86%, 87%, 88%, 89%, 90%, 91%, 92%, 93%, 94%, 95%, 96%, 97%, 98%, 99% or 100% sequence identity to SEQ ID NO: 440.
[0407] 2. Method according to item 1, wherein said PCD polypeptide comprises one or more motifs having at least 50%, 51%, 52%, 53%, 54%, 55%, 56%, 57%, 58%, 59%, 60%, 61%, 62%, 63%, 64%, 65%, 66%, 67%, 68%, 69%, 70%, 71%, 72%, 73%, 74%, 75%, 76%, 77%, 78%, 79%, 80%, 81%, 82%, 83%, 84%, 85%, 86%, 87%, 88%, 89%, 90%, 91%, 92%, 93%, 94%, 95%, 96%, 97%, 98%, 99% or 100% to any one or more of the following motifs:
   [0408] (i) Motif 12 (SEQ ID NO: 441): [G/E]-[D/N]-[F/L]-G-A-R-D-P-x(3)-E-x(4)-F-G-[D/E]K;
   [0409] (ii) Motif 13 (SEQ ID NO: 442): [E/D/K/H/Q/N]-x(3)-H-[H/NHP/C/S]-x(5,6)-[Y/W/F/H]-x(9)-[H/W]-x(8,15)-D;
   [0410] (iii) Motif 14 (SEQ ID NO: 443): WK(V/L)(R/K) wherein amino acids in brackets represent alternative amino acids at the same location;
   [0411] (iv) Motif 15 (SEQ ID NO: 444): TDFI;
   [0412] (v) Motif 16 (SEQ ID NO: 445): (S/V)(V/I)(G/R/S/A)GL(T/S);
   [0413] (vi) Motif 17 (SEQ ID NO: 446): LGDF(G/R)(A/R)(R/A)(D/G)P;
   [0414] (vii) Motif 18 (SEQ ID NO:447): H(R/K)ILIP(T/A)
[0415] 3. Method according to item 1 or 2, wherein said modulated expression is effected by introducing and expressing in a plant a nucleic acid encoding a PCD polypeptide.
[0416] 4. Method according to any one of items 1 to 3, wherein said nucleic acid encoding a PCD polypeptide encodes any one of the proteins listed in Table A3 or is a portion of such a nucleic acid, or a nucleic acid capable of hybridising with such a nucleic acid.
[0417] 5. Method according to any one of items 1 to 4, wherein said nucleic acid sequence encodes an orthologue or paralogue of any of the proteins given in Table A3.
[0418] 6. Method according to any preceding item, wherein said enhanced yield-related traits comprise increased yield, preferably increased early vigour and/or increased biomass and/or increased seed yield relative to control plants.
[0419] 7. Method according to any one of items 1 to 6, wherein said enhanced yield-related traits are obtained under non-stress conditions.
[0420] 8. Method according to any one of items 1 to 6, wherein said enhanced yield-related traits are obtained under conditions of drought stress, salt stress or nitrogen deficiency.
[0421] 9. Method according to any one of items 3 to 8, wherein said nucleic acid is operably linked to a constitutive promoter, preferably to a GOS2 promoter, most preferably to a GOS2 promoter from rice.
[0422] 10. Method according to any one of items 1 to 9, wherein said nucleic acid encoding a PCD polypeptide is of plant origin, preferably from a monocotyledonous plant, further preferably from the family Poaceae, more preferably from the genus Oryza, most preferably from Oryza sativa.
[0423] 11. Plant or part thereof, including seeds, obtainable by a method according to any one of items 1 to 10, wherein said plant or part thereof comprises a recombinant nucleic acid encoding a PCD polypeptide.
[0424] 12. Construct comprising:
   [0425] (i) nucleic acid encoding a PCD polypeptide as defined in items 1 or 2;
   [0426] (ii) one or more control sequences capable of driving expression of the nucleic acid sequence of (a); and optionally
   [0427] (iii) a transcription termination sequence.
[0428] 13. Construct according to item 12, wherein one of said control sequences is a constitutive promoter, preferably a GOS2 promoter, most preferably a GOS2 promoter from rice.
[0429] 14. Use of a construct according to item 12 or 13 in a method for making plants having increased yield, particularly increased early vigour and/or increased biomass and/or increased seed yield relative to control plants.
[0430] 15. Plant, plant part or plant cell transformed with a construct according to item 12 or 13.
[0431] 16. Method for the production of a transgenic plant having increased yield, particularly increased early vigour and/or increased biomass and/or increased seed yield relative to control plants, comprising:
   [0432] (i) introducing and expressing in a plant a nucleic acid encoding a PCD polypeptide as defined in item 1 or 2; and
   [0433] (ii) cultivating the plant cell under conditions promoting plant growth and development; and optionally
   [0434] (iii) selecting for plants having increased yield.
[0435] 17. Transgenic plant having increased yield, particularly increased early vigour and/or increased biomass and/or increased seed yield, relative to control plants, resulting from modulated expression of a nucleic acid encoding a PCD polypeptide as defined in item 1 or 2, or a transgenic plant cell derived from said transgenic plant.
[0436] 18. Transgenic plant according to item 11, 15 or 17, or a transgenic plant cell derived thereof, wherein said plant is a crop plant or a monocot or a cereal, such as rice, maize, wheat, barley, millet, rye, triticale, sorghum emmer, spelt, secale, einkorn, teff, milo and oats.
[0437] 19. Harvestable parts of a plant according to item 18, wherein said harvestable parts are preferably shoot biomass and/or seeds.
[0438] 20. Products derived from a plant according to item 18 and/or from harvestable parts of a plant according to item 19.
[0439] 21. Use of a nucleic acid encoding a PCD polypeptide in increasing yield, particularly in increasing early vigour and/or in increasing biomass and/or increasing seed yield in plants, relative to control plants.

### 4. Pseudo Response Regulator Type 2 (PRR2)

[0440] 1. A method for increasing yield-related traits in plants relative to control plants, comprising increasing expression in a plant of a nucleic acid sequence encoding a pseudo response regulator type 2 (PRR2) polypeptide, which PRR2 polypeptide comprises (i) a signal transduction response regulator receiver region with an InterPro entry IPR001789; and (ii) a Myb-like DNA binding region (SHAQKYF class) with an InterPro entry IPR006447, and optionally selecting for plants having increased yield-related traits.
[0441] 2. Method according to item 1, wherein said PRR2 polypeptide comprises (i) in increasing order of preference at least 50%, 55%, 60%, 65%, 70%, 75%, 80%, 85%, 90%, 95%, 98%, 99% or more amino acid sequence identity to a pseudo response receiver domain as represented by SEQ ID NO: 475; and (ii) in increasing order of preference at least 50%, 55%, 60%, 65%, 70%, 75%, 80%, 85%, 90%, 95%, 98%, 99% or more amino acid sequence identity to a Myb-like DNA binding domain as represented by SEQ ID NO: 476.
[0442] 3. Method according to item 2, wherein said PRR2 polypeptide further comprises in increasing order of preference at least 50%, 55%, 60%, 65%, 70%, 75%, 80%, 85%, 90%, 95%, 98%, 99% or more amino acid sequence identity to a C-terminal conserved domain as represented by SEQ ID NO: 477.
[0443] 4. Method according to any preceding item, wherein said PRR2 polypeptide, when used in the construction of a response receiver domain phylogenetic tree, such as the one depicted in FIG. 11, clusters with the APRR2 (pseudo response regulator type 2) group of polypeptides comprising the polypeptide sequences as represented by SEQ ID NO: 452 and SEQ ID NO: 456, rather than with any other group.
[0444] 5. Method according to any preceding item, wherein said PRR2 polypeptide has in increasing order of preference at least 50%, 55%, 60%, 65%, 70%, 75%, 80%, 85%, 90%, 95%, 98%, 99% or more amino acid sequence identity to a PRR2 polypeptide as represented by SEQ ID NO: 452, or to any of the polypeptide sequences given in Table A4 herein.
[0445] 6. Method according to any preceding item, wherein said nucleic acid sequence encoding a PRR2 polypeptide is represented by any one of the nucleic acid sequence SEQ ID NOs given in Table A4 or a portion thereof, or a sequence capable of hybridising with any one of the nucleic acid sequences SEQ ID NOs given in Table A4, or to a complement thereof.
[0446] 7. Method according to any preceding item, wherein said nucleic acid sequence encodes an orthologue or paralogue of any of the polypeptide sequence SEQ ID NOs given in Table A4.
[0447] 8. Method according to any preceding item, wherein said increased expression is effected by any one or more of: T-DNA activation tagging, TILLING, or homologous recombination.
[0448] 9. Method according to any preceding item, wherein said increased expression is effected by introducing and expressing in a plant a nucleic acid sequence encoding a PRR2 polypeptide.
[0449] 10. Method according to any preceding item, wherein said increased yield-related trait is one or more of: increased aboveground biomass, increased early vigor, earlier flowering, increased root biomass, increased plant height, increased seed yield per plant, increased number of filled seeds, increased total number of seeds, increased number of primary panicles, increased number of flowers per panicles, increased harvest index (HI), and increased Thousand Kernel Weight (TKW).
[0450] 11. Method according to any preceding item, wherein said nucleic acid sequence is operably linked to a constitutive promoter.
[0451] 12. Method according to item 11, wherein said constitutive promoter is a GOS2 promoter, preferably a GOS2 promoter from rice, most preferably a GOS2 sequence as represented by SEQ ID NO: 478.
[0452] 13. Method according to any preceding item, wherein said nucleic acid sequence encoding a PRR2 polypeptide is from a plant, further preferably from a dicotyledonous plant, more preferably from the family Solanaceae, most preferably the nucleic acid sequence is from Lycopersicon esculentum.
[0453] 14. Plants, parts thereof (including seeds), or plant cells obtainable by a method according to any preceding item, wherein said plant, part or cell thereof comprises an isolated nucleic acid transgene encoding a PRR2 polypeptide.
[0454] 15. An isolated nucleic acid molecule selected from:
   [0455] (i) a nucleic acid sequence as represented by SEQ ID NO: 459;
   [0456] (ii) the complement of a nucleic acid sequence as represented by SEQ ID NO: 459;
   [0457] (iii) a nucleic acid sequence encoding a PRR2 polypeptide having, in increasing order of preference, at least 50%, 55%, 60%, 65%, 70%, 75%, 80%, 85%, 90%, 95%, 96%, 97%, 98%, 99% or more amino acid sequence identity to the polypeptide sequence represented by SEQ ID NO: 460.
[0458] 16. An isolated polypeptide selected from:
   [0459] (i) a polypeptide sequence as represented by SEQ ID NO: 460;
   [0460] (ii) a polypeptide sequence having, in increasing order of preference, at least 50%, 55%, 60%, 65%, 70%, 75%, 80%, 85%, 90%, 95%, 96%, 97%, 98%, 99% or more amino acid sequence identity to a polypeptide sequence as represented by any one of SEQ ID NO: 460;
   [0461] (iii) derivatives of any of the polypeptide sequences given in (i) or (ii) above.
[0462] 17. Construct comprising:
   [0463] (a) a nucleic acid sequence encoding a PRR2 polypeptide as defined in any one of items 1 to 7, or 15;
   [0464] (b) one or more control sequences capable of driving expression of the nucleic acid sequence of (a); and optionally
   [0465] (c) a transcription termination sequence.
[0466] 18. Construct according to item 17 wherein said control sequence is a consitituve promoter.
[0467] 19. Construct according to item 18 wherein said consitituve promoter is a GOS2 promoter, preferably a GOS2 promoter from rice, most preferably a GOS2 sequence as represented by SEQ ID NO: 28
[0468] 20. Use of a construct according to any one of items 17 to 19 in a method for making plants having increased yield-related traits relative to control plants, which increased yield-related traits are one or more of: increased aboveground biomass, increased early vigor, earlier flowering, increased root biomass, increased plant height, increased seed yield per plant, increased number of filled seeds, increased total number of seeds, increased number of primary panicles, increased number of flowers per panicles, increased harvest index (HI), and increased Thousand Kernel Weight (TKW).
[0469] 21. Plant, plant part or plant cell transformed with a construct according to any one of items 17 to 19.
[0470] 22. Method for the production of transgenic plants having increased yield-related traits relative to control plants, comprising:
   [0471] (i) introducing and expressing in a plant, plant part, or plant cell, a nucleic acid sequence encoding a PRR2 polypeptide as defined in any one of items 1 to 7, or 15; and
   [0472] (ii) cultivating the plant cell, plant part, or plant under conditions promoting plant growth and development.
[0473] 23. Transgenic plant having increased yield-related traits relative to control plants, resulting from increased expression of an isolated nucleic acid sequence encoding a PRR2 polypeptide as defined in any one of items 1 to 7, or 15, or a transgenic plant cell or transgenic plant part derived from said transgenic plant.
[0474] 24. Transgenic plant according to item 14, 21, or 23, wherein said plant is a crop plant or a monocot or a cereal, such as rice, maize, wheat, barley, millet, rye, triticale, sorghum and oats, or a transgenic plant cell derived from said transgenic plant.
[0475] 25. Harvestable parts comprising an isolated nucleic acid sequence encoding a PRR2 polypeptide, of a plant according to item 24, wherein said harvestable parts are preferably seeds.
[0476] 26. Products derived from a plant according to item 24 and/or from harvestable parts of a plant according to item 25.
[0477] 27. Use of a nucleic acid sequence encoding a PRR2 polypeptide as defined in any one of items 1 to 7, or 15, in increasing yield-related traits, comprising one or more of: increased aboveground biomass, increased early vigor, earlier flowering, increased root biomass, increased plant height, increased seed yield per plant, increased number of filled seeds, increased total number of seeds, increased number of primary panicles, increased number of flowers per panicles, increased harvest index (HI), and increased Thousand Kernel Weight (TKW).

### DESCRIPTION OF FIGURES

[0478] The present invention will now be described with reference to the following figures in which:

[0479] FIG. 1 represents a multiple sequence alignment of bHLH9 polypeptides. The position of the HLH domain is indicated over the consensus sequence (underlined sequence). The position of the 5-9-13 configuration is boxed in the consensus sequence.

[0480] FIG. 2 shows phylogenetic tree of bHLH9 polypeptides.

[0481] FIG. 3 represents the binary vector used for increased expression in Oryza sativa of a bHLH9-encoding nucleic acid under the control of a rice GOS2 promoter (pGOS2).

[0482] FIG. 4 represents the domain structure of the IMB1 polypeptide. Panel a shows the position of the domains in SEQ ID NO: 301. Domain 7 is not present as such in SEQ ID NO: 301, but occurs in other IMB1 proteins. The predicted Nuclear Localization Signal is shown in italics. Panel b represents an alignment between SEQ ID NO: 301 and IMB1 of Arabidopsis thaliana (SEQ ID NO: 336; Duque and Chua, 2003) with the position of the bromodomain (as identified by Pfam, bold underlined) and the NET domain indicated (as identified in Duque and Chua, 2003, bold).

[0483] FIG. 5 represents a multiple alignment of various IMB1 proteins. Conserved regions among the proteins can readily be recognised.

[0484] FIG. 6 shows a phylogenetic tree in which the group of IMB1 proteins is indicated as IMB1/GTE1.

[0485] FIG. 7 represents the binary vector used for increased expression in Oryza sativa of an IMB1-encoding nucleic acid under the control of a rice GOS2 promoter (pGOS2).

[0486] FIG. 8 represents a multiple alignment of PCD polypeptides

[0487] FIG. 9 shows a phylogenetic tree of PCD polypeptides as of FIG. 3B of Naponelli et al.

[0488] FIG. 10 represents the binary vector used for increased expression in Oryza sativa of a PCD-encoding nucleic acid under the control of a rice GOS2 promoter (pGOS2)

[0489] FIG. 11 represents the phylogenetic relationship among response regulators and pseudo response regulators from Arabidopsis thaliana, based upon amino acid sequence of the receiver domain. Numbers indicate percentage of bootstrapped replicates that give the same branch after 1,000 iterations (according to Mason et al. (2004) Plant Phys 135: 927-937). Polypeptides useful in performing the methods of the invention cluster with APRR2, marked by a black arrow.

[0490] FIG. 12 represents a cartoon of a PRR2 polypeptide as represented by SEQ ID NO: 452, which comprises the following features: (i) a signal transduction response regulator receiver region with an InterPro entry IPR001789, where the canonical D residue of response regulator receiver region is replaed by an E residue of a pseudo response regulator receiver region; and (ii) a B motif or GARP domain or Myb-like DNA-binding region (SHAQKYF class) with an InterPro entry IPR006447.

[0491] FIG. 13 shows an AlignX (from Vector NTI 10.3, Invitrogen Corporation) multiple sequence alignment of the PRR2 polypeptides from Table A4. A signal transduction response regulator receiver region with an InterPro entry IPR001789, a B motif (or GARP domain or Myb-like DNA-binding region (SHAQKYF class) with an InterPro entry IPR006447), and a C-terminal Conserved Domain, are marked with X's below the consensus sequence. The pseudo response regulator receiver residue E is boxed.

[0492] FIG. 14 shows the binary vector for increased expression in Oryza sativa plants of a nucleic acid sequence encoding a PRR2 polypeptide under the control of a promoter functioning in plants.

### EXAMPLES

[0493] The present invention will now be described with reference to the following examples, which are by way of illustration alone. The following examples are not intended to completely define or otherwise limit the scope of the invention.

[0494] DNA manipulation: unless otherwise stated, recombinant DNA techniques are performed according to standard protocols described in (Sambrook (2001) Molecular Cloning: a laboratory manual, 3rd Edition Cold Spring Harbor Laboratory Press, CSH, New York) or in Volumes 1 and 2 of Ausubel et al. (1994), Current Protocols in Molecular Biology, Current Protocols. Standard materials and methods for plant molecular work are described in Plant Molecular Biology Labfax (1993) by R. D. D. Croy, published by BIOS Scientific Publications Ltd (UK) and Blackwell Scientific Publications (UK).

### Example 1

### Identification of Sequences Related to the Nucleic Acid Sequence Used in the Methods of the Invention

[0495] Sequences (full length cDNA, ESTs or genomic) related to the nucleic acid sequence used in the methods of the present invention were identified amongst those maintained in the Entrez Nucleotides database at the National Center for Biotechnology Information (NCBI) and other databases using database sequence search tools, such as the Basic Local Alignment Tool (BLAST) (Altschul et al. (1990) J. Mol. Biol. 215:403-410; and Altschul et al. (1997) Nucleic Acids Res. 25:3389-3402). The program is used to find regions of local similarity between sequences by comparing nucleic acid or polypeptide sequences to sequence databases and by calculating the statistical significance of matches. For example, the polypeptide encoded by the nucleic acid used in the present invention was used for the TBLASTN algorithm, with default settings and the filter to ignore low complexity sequences set off. The output of the analysis was viewed by pairwise comparison, and ranked according to the probability score (E-value), where the score reflect the probability that a particular alignment occurs by chance (the lower the E-value, the more significant the hit). In addition to E-values, comparisons were also scored by percentage identity. Percentage identity refers to the number of identical nucleotides (or amino acids) between the two compared nucleic acid (or polypeptide) sequences over a particular length. In some instances, the default parameters may be adjusted to modify the stringency of the search. For example the E-value may be increased to show less stringent matches. This way, short nearly exact matches may be identified.

11. basic-Helix-Loop-Helix Group 9 (bHLH9)

[0496] Table A1 provides a list of nucleic acid sequences related to the nucleic acid sequence used in the methods of the present invention.

TABLE A
Examples of bHLH9 nucleic acids and polypeptides:

| | Nucleic Acid | Polypeptide |
|---|---|---|
| Name | SEQ ID NO: | SEQ ID NO: |
| O. sativa_Os01g0900800 | 1 | 2 |
| A. thaliana_bHLH130_9_AT2G42280 | 3 | 4 |
| A. thaliana_bHLH122_9_AT1G51140 | 5 | 6 |
| A. thaliana_bHLH081_9_AT4G09180 | 7 | 8 |
| A. thaliana_bHLH080_9_AT1G35460 | 9 | 10 |
| A. thaliana_bHLH128_9_AT1G05805 | 11 | 12 |
| A. thaliana_bHLH129_9_AT2G43140 | 13 | 14 |
| A. formosa_TA12011_338618 | 15 | 16 |
| A. formosa_TA18296_338618 | 17 | 18 |
| B. napus_BPS_9258 | 19 | 20 |
| B. oleracea_EH428573 | 21 | 22 |
| B. oleracea_TA6610_3712 | 23 | 24 |
| C. clementina_TA5735_85681 | 25 | 26 |
| C. intybus_EH689338 | 27 | 28 |
| C. obtusa_BW987363 | 29 | 30 |
| C. sinensis_TA15236_2711 | 31 | 32 |
| C. sinensis_TA15331_2711 | 33 | 34 |
| C. solstitialis_EH761577 | 35 | 36 |
| C. tinctorius_EL407531 | 37 | 38 |
| E. esula_TA10959_3993 | 39 | 40 |
| G. hirsutum_TA24161_3635 | 41 | 42 |
| G. hybrid_AJ763309 | 43 | 44 |
| G. max_BPS_22716 | 45 | 46 |
| G. max_BPS_39182 | 47 | 48 |
| G. max_TA56453_3847 | 49 | 50 |
| G. max_TA57335_3847 | 51 | 52 |
| G. max_TA63030_3847 | 53 | 54 |
| G. raimondii_TA12344_29730 | 55 | 56 |
| G. soja_CA783858 | 57 | 58 |
| H. ciliaris_EL431737 | 59 | 60 |
| H. paradoxus_EL487892 | 61 | 62 |
| H. petiolaris_DY944559 | 63 | 64 |
| H. vulgare_TA45248_4513 | 65 | 66 |
| H. vulgare_TA47636_4513 | 67 | 68 |
| I. nil_TA15694_35883 | 69 | 70 |
| I. nil_TA8920_35883 | 71 | 72 |
| I. nil_TA9081_35883 | 73 | 74 |
| I. nil_TA9289_35883 | 75 | 76 |
| L. saligna_TA4923_75948 | 77 | 78 |
| L. sativa_TA5039_4236 | 79 | 80 |
| L. serriola_DW114802 | 81 | 82 |
| M. truncatula_AC141114_16.2 | 83 | 84 |
| M. truncatula_AC149471_36.2 | 85 | 86 |
| M. truncatula_TA37090_3880 | 87 | 88 |
| N. benthamiana_TA8284_4100 | 89 | 90 |
| N. benthamiana_TA8285_4100 | 91 | 92 |
| O. sativa_LOC_Os02g39140.1 | 93 | 94 |
| O. sativa_Os04g0489600 | 95 | 96 |
| O. sativa_Os08g0506700 | 97 | 98 |
| O. sativa_Os09g0487900 | 99 | 100 |
| P. patens_121037_e_gw1.34.393.1 | 101 | 102 |
| P. patens_148201_e_gw1.273.42.1 | 103 | 104 |
| P. patens_TA27139_3218 | 105 | 106 |
| P. patens_TA32785_3218 | 107 | 108 |
| P. taeda_TA15788_3352 | 109 | 110 |
| P. tremula_DN488299 | 111 | 112 |
| P. tremula_TA18674_47664 | 113 | 114 |
| P. trichocarpa_scaff_I.1785 | 115 | 116 |
| P. trichocarpa_scaff_III.1580 | 117 | 118 |
| P. trichocarpa_scaff_IX.1004 | 119 | 120 |
| P. trichocarpa_scaff_XIV.978 | 121 | 122 |
| P. trichocarpa_scaff_XIX.717 | 123 | 124 |
| P. trichocarpa_scaff_XVI.437 | 125 | 126 |
| R. communis_EG683575 | 127 | 128 |
| S. bicolor_TA33134_4558 | 129 | 130 |
| S. lycopersicum_TA38189_4081 | 131 | 132 |
| S. lycopersicum_TA46743_4081 | 133 | 134 |
| S. officinarum_CA143325 | 135 | 136 |
| S. officinarum_TA45654_4547 | 137 | 138 |
| S. tuberosum_CV506096 | 139 | 140 |
| S. tuberosum_TA26686_4113 | 141 | 142 |
| S. tuberosum_TA29368_4113 | 143 | 144 |
| S. tuberosum_TA37004_4113 | 145 | 146 |
| S. tuberosum_TA40158_4113 | 147 | 148 |
| T. aestivum_TA88301_4565 | 149 | 150 |
| T. officinale_DY832981 | 151 | 152 |
| V. vinifera_GSVIVT00001847001 | 153 | 154 |
| V. vinifera_GSVIVT00005670001 | 155 | 156 |
| V. vinifera_GSVIVT00008845001 | 157 | 158 |
| V. vinifera_GSVIVT00024649001 | 159 | 160 |
| V. vinifera_GSVIVT00025522001 | 161 | 162 |
| V. vinifera_TA49422_29760 | 163 | 164 |
| Z. mays_BPS_3797 | 165 | 166 |
| Z. mays_BPS_30292 | 167 | 168 |
| Z. mays_BPS_52761 | 169 | 170 |
| Z. mays_TA16655_4577999 | 171 | 172 |
| Z. officinale_TA2571_94328 | 173 | 174 |
| Z. officinale_TA334_94328 | 175 | 176 |
| Z. officinale_TA5709_94328 | 177 | 178 |
| Z. officinale_TA6615_94328 | 179 | 180 |

### 1.2. Imbibition-Inducible 1 (IMB1)

[0497] Table A2 provides a list of nucleic acid sequences related to the nucleic acid sequence used in the methods of the present invention.

TABLE A2
Examples of IMB1 nucleic acids and polypeptides:

| | Nucleic acid | Protein |
|---|---|---|
| Plant Source | SEQ ID NO: | SEQ ID NO: |
| Arabidopsis thaliana_AT2G34900_GTE1 | 314 | 336 |
| Arabidopsis thaliana_AT3G52280_GTE6 | 315 | 337 |
| Centaurea solstitialis_TA2829 | 316 | 338 |
| Gossypium hirsutum_TA31156 | 317 | 339 |
| Gossypium raimondii_CO070884 | 318 | 340 |
| Gossypium raimondii_TA13411 | 319 | 341 |
| Lactuca saligna_DW067496 | 320 | 342 |
| Medicago truncatula_AC174355 | 321 | 343 |
| Medicago truncatula_GTE1302 | 322 | 344 |
| Oryza sativa_GTE2201 | 323 | 345 |
| Oryza sativa_GTE701 | 324 | 346 |
| Physcomitrella patens_GTE1501 | 325 | 347 |
| Physcomitrella patens_GTE1502 | 326 | 348 |
| Physcomitrella patens_GTE1505 | 327 | 349 |
| Populus trichocarpa_GTE907 | 328 | 350 |
| Populus trichocarpa_GTE908 | 329 | 351 |
| Populus trichocarpa_GTE909 | 330 | 352 |
| Sorghum bicolor_TA26028 | 331 | 353 |
| Triticum aestivum_TA83944 | 332 | 354 |
| Vitis vinifera_GSVIVT00002627001 | 333 | 355 |
| Vitis vinifera_GSVIVT00008344001 | 334 | 356 |
| Zea mays_GTE110 | 335 | 357 |

[0498] In some instances, related sequences have tentatively been assembled and publicly disclosed by research institutions, such as The Institute for Genomic Research (TIGR). The Eukaryotic Gene Orthologs (EGO) database may be used to identify such related sequences, either by keyword search or by using the BLAST algorithm with the nucleic acid or polypeptide sequence of interest.

### 1.3. PCD-Like

[0499] Table A3 provides a list of nucleic acid sequences related to the nucleic acid sequence used in the methods of the present invention.

TABLE A3
Examples of PCD nucleic acids and polypeptides:

| | Nucleic acid | Polypeptide |
|---|---|---|
| Name | SEQ ID NO: | SEQ ID NO: |
| O. sativa_Os03g0100200 | 358 | 359 |
| A. cepa_CF450468#1 | 360 | 361 |
| A. thaliana_AT1G29810.1#1 | 362 | 363 |
| A. thaliana_AT5G51110.1#1 | 364 | 365 |
| AT1G29810.1#1 | 366 | 367 |
| AT5G51110.1#1 | 368 | 369 |
| H. vulgare_BQ462597#1 | 370 | 371 |
| H. vulgare_TA37167_4513#1 | 372 | 373 |
| H. vulgare_TA39366_4513#1 | 374 | 375 |
| M. truncatula_TA24237_3880#1 | 376 | 377 |
| O. sativa_Os01g0390600#1 | 378 | 379 |
| O. sativa_Os01g0663500#1 | 380 | 381 |
| P. trichocarpa_DCOH like | 382 | 383 |
| P. trichocarpa_scaff_232.30#1 | 384 | 385 |
| P. trichocarpa_scaff_XI.475#1 | 386 | 387 |
| S. lycopersicum_BP905715#1 | 388 | 389 |
| S. lycopersicum_DB718111#1 | 390 | 391 |
| S. lycopersicum_TA38587_4081#1 | 392 | 393 |
| S. officinarum_CA113975#1 | 394 | 395 |
| S. officinarum_CA275526#1 | 396 | 397 |
| S. officinarum_CA275597#1 | 398 | 399 |
| T. aestivum_CA600360#1 | 400 | 401 |
| T. aestivum_CA631555#1 | 402 | 403 |
| T. aestivum_CA636226#1 | 404 | 405 |
| T. aestivum_CA678224#1 | 406 | 407 |
| T. aestivum_CA721065#1 | 408 | 409 |
| T. aestivum_CA729021#1 | 410 | 411 |
| T. aestivum_CK206167#1 | 412 | 413 |
| T. aestivum_CK211978#1 | 414 | 415 |
| T. aestivum_CK212253#1 | 416 | 417 |
| T. aestivum_CK212754#1 | 418 | 419 |
| T. aestivum_CN012063#1 | 420 | 421 |
| T. aestivum_CV761453#1 | 422 | 423 |
| T. aestivum_CV768439#1 | 424 | 425 |
| T. aestivum_CV772309#1 | 426 | 427 |
| T. aestivum_TA70795_4565#1 | 428 | 429 |
| T. aestivum_TA70797_4565#1 | 430 | 431 |
| T. aestivum_TA70798_4565#1 | 432 | 433 |
| T. aestivum_TA70799_4565#1 | 434 | 435 |
| T. aestivum_TA70800_4565#1 | 436 | 437 |
| T. aestivum_TA92660_4565#1 | 438 | 439 |

[0500] In some instances, related sequences have tentatively been assembled and publicly disclosed by research institutions, such as The Institute for Genomic Research (TIGR; beginning with TA). The Eukaryotic Gene Orthologs (EGO) database may be used to identify such related sequences, either by keyword search or by using the BLAST algorithm with the nucleic acid sequence or polypeptide sequence of interest. On other instances, special nucleic acid sequence databases have been created for particular organisms, such as by the Joint Genome Institute. Further, access to proprietary databases, has allowed the identification of novel nucleic acid and polypeptide sequences.

### 1.4. Pseudo Response Regulator Type 2 (PRR2)

[0501] Table A4 provides a list of nucleic acid sequences related to the nucleic acid sequence used in the methods of the present invention.

TABLE A4
Examples of PRR2 nucleic acids and polypeptide sequences

| | Public database | Nucleic acid | Polypeptide |
|---|---|---|---|
| Name | accession number | SEQ ID NO: | SEQ ID NO: |
| Lyces_PRR2 | NA | 451 | 452 |
| Aqufo_PRR2 | DT734703 | 453 | 454 |
| | DR929648.1 | | |
| | DR949155.1 | | |
| Arath_APRR2 | At4g18020 | 455 | 456 |
| Eucgr_PRR2 | NA | 457 | 458 |
| Glyma_PRR2 | BE330069.1 | 459 | 460 |
| | BE659830.1 | | |
| | BE661803.1 | | |
| | FK011978.1 | | |
| | proprietary | | |
| Lotja_PRR2 | AP004489 | 461 | 462 |
| Lyces_PRR2 | AC226015 | 463 | 464 |
| II | | | |
| Medtr_PRR2 | AC144516.5 | 465 | 466 |
| Poptr_PRR2 I | lcl_scaff_29.152 | 467 | 468 |
| Poptr_PRR2 | lcl_scaff_118.53 | 469 | 470 |
| II | | | |
| Vitvi_PRR2 | AM443941 | 471 | 472 |
| Orysa_PRR2 | AK242722 | 473 | 474 |
| like | | | |

[0502] In some instances, related sequences have tentatively been assembled and publicly disclosed by research institutions, such as The Institute for Genomic Research (TIGR; beginning with TA). The Eukaryotic Gene Orthologs (EGO) database may be used to identify such related sequences, either by keyword search or by using the BLAST algorithm with the nucleic acid sequence or polypeptide sequence of interest. On other instances, special nucleic acid sequence databases have been created for particular organisms, such as by the Joint Genome Institute. Further, access to proprietary databases, has allowed the identification of novel nucleic acid and polypeptide sequences.

### Example 2

### Alignment of Sequences Related to the Polypeptide Sequences Used in the Methods of the Invention

[0503] 2.1. basic-Helix-Loop-Helix Group 9 (bHLH9)

[0504] Alignment of polypeptide sequences was performed using the AlignX programme from the Vector NTI (Invitrogen) which is based on the popular Clustal W algorithm of progressive alignment (Thompson et al. (1997) Nucleic Acids Res 25:4876-4882; Chema et al. (2003). Nucleic Acids Res 31:3497-3500). Default values are for the gap open penalty of 10, for the gap extension penalty of 0.1 and the selected weight matrix is Blosum 62 (if polypeptides are aligned). Sequence conservation among bHLH9 polypeptides is essentially in the HLH domain of the polypeptides. The bHLH9 polypeptides are aligned in FIG. 1.

[0505] A phylogenetic tree of bHLH9 polypeptides (FIG. 2) was constructed using a neighbour-joining clustering algorithm as provided in the AlignX programme from the Vector NTI (Invitrogen). As shown in the tree SEQ ID NO: 2 (O. sativa_Os01g0900800) clusters within the bHLH9 clade (group) defined by defined by A. thaliana bHLH130 9 AT2G42280; A. thaliana bHLH122 9 AT1G51140; A. thaliana bHLH081 9 AT4G09180; A. thaliana bHLH080 9 AT1G35460; A. thaliana bHLH128 9 AT1G05805; and A. thaliana bHLH129 9 AT2G43140.

[0506] The sequences used in the construction of the tree are SEQ ID NO: 2, 276, 277, 278, 279, 280, 281, 282, 283, 284, 285, 286, 287, 288, 289, 290, 291, 292, 293, 294, 295, 296, 297, 298 and 299. It should be noted that sequences represented by SEQ ID NO: 276, 277, 278, 279, 280, 281, 282, 283, 284, 285, 286, 287, 288, 289, 290, 291, 292, 293, 294, 295, 296, 297, 298 and 299 represent bHLH proteins that do not belong to the bHLH9 clade (group) and therefore are not part of the invention.

### 2.2. Imbibition-Inducible 1 (IMB1)

[0507] Alignment of polypeptide sequences was performed using the MUSCLE 3.7 program (Edgar, Nucleic Acids Research 32, 1792-1797, 2004). Default values are for the gap open penalty of 10, for the gap extension penalty of 0.1 and the selected weight matrix is Blosum 62 (if polypeptides are aligned). Minor manual editing was done to further optimise the alignment. Sequence conservation among IMB1 polypeptides is essentially in the bromodomain of the polypeptides, and in the NET domain, while the remainder of the protein sequence is usually more variable in sequence length and composition. The IMB1 polypeptides are aligned in FIG. 5.

[0508] A phylogenetic tree of IMB1 polypeptides (FIG. 6) was constructed: The proteins were aligned using MUSCLE (Edgar (2004), Nucleic Acids Research 32(5): 1792-97). A Neighbour-Joining tree was calculated using QuickTree (Howe et al. (2002), Bioinformatics 18(11): 1546-7). Support for the major branching after 100 bootstrap repetitions is indicated. A circular cladogram was drawn using Dendroscope (Huson et al. (2007), BMC Bioinformatics 8(1): 460). 4 different subclasses of GTE can be defined with good statistical support. Other GTEs and bromodomain proteins are difficult to assign to any class with confidence.

[0509] A MEME analysis (Bailey et al. Nucleic Acids Research 34, W369-W373, 2006) using the sequences listed in table A provided the following motifs:

| Motif 3: | |
|---|---|
| Multilevel | QITQHKWAWPFLKPVDVEGLGLHDYYEVIEKPMDFSTIKNKMEAKDGTGY |
| consensus sequence | S MQ K I D G KQ S |
| | E V T |
| | H |
| Motif 3 in SEQ ID NO: 301 starts at position 109: | |
| Motif 4: | |
| Multilevel | REICADVRLVFKNAMKYNDERHDVHVMAKTLLEKFEEKWLQLLPKVAEEE |
| consensus sequence | YS I GS I S G F E |
| Motif 4 in SEQ ID NO: 301 starts at position 162 | |
| Motif 5: | |
| Multilevel | MQLAQEAAHAKMAKDLSNELYEIDMQLEELREMVVQKCRKMSTEEKRKLG |
| consensus sequence | V S I LTRET VNKH Q I R T K |
| | E |
| Motif 5 in SEQ ID NO: 301 starts at position 225 | |
| Motif 6: | |
| Multilevel | LTRLSPEDLSKALEIVAQNNPSFQATAEEVDLDIDAQSESTLWRLKFFVK |
| consensus sequence | CK DN V ED D E M T Q |
| | G R |

Motif 6 in SEQ ID NO: 301 starts at position 277

### 2.3. PCD-Like

[0510] Alignment of polypeptide sequences was performed using the AlignX programme from the Vector NTI (Invitrogen) which is based on the popular Clustal W algorithm of progressive alignment (Thompson et al. (1997) Nucleic Acids Res 25:4876-4882; Chema et al. (2003). Nucleic Acids Res 31:3497-3500). Default values are for the gap open penalty of 10, for the gap extension penalty of 0.1 and the selected weight matrix is Blosum 62 (if polypeptides are aligned). Sequence conservation among PCD polypeptides is essentially in the C-terminal PCD domain of the polypeptides, the N-terminal domain usually being more variable in sequence length and composition. The PCD polypeptides are aligned in FIG. 9.

### 2.4. Pseudo Response Regulator Type 2 (PRR2)

[0511] Mutliple sequence alignment of all the PRR2 polypeptide sequences in Table A4 was performed using the AlignX algorithm (from Vector NTI 10.3, Invitrogen Corporation). Results of the alignment are shown in FIG. 3 of the present application. A signal transduction response regulator receiver region with an InterPro entry IPR001789, a B motif (or GARP domain or Myb-like DNA-binding region (SHAQKYF class) with an InterPro entry IPR006447), and a C-terminal Conserved Domain, are marked with X's below the consensus sequence. The pseudo response regulator receiver residue E is boxed.

### Example 3

### Calculation of Global Percentage Identity Between Polypeptide Sequences Useful in Performing the Methods of the Invention

[0512] 3.1. basic-Helix-Loop-Helix Group 9 (bHLH9)

[0513] Global percentages of similarity and identity between full length polypeptide sequences useful in performing the methods of the invention were determined using one of the methods available in the art, the MatGAT (Matrix Global Alignment Tool) software (BMC Bioinformatics. 2003 4:29. MatGAT: an application that generates similarity/identity matrices using protein or DNA sequences. Campanella J J, Bitincka L, Smalley J; software hosted by Ledion Bitincka). MatGAT software generates similarity/identity matrices for DNA or protein sequences without needing pre-alignment of the data. The program performs a series of pair-wise alignments using the Myers and Miller global alignment algorithm (with a gap opening penalty of 12, and a gap extension penalty of 2), calculates similarity and identity using for example Blosum 62 (for polypeptides), and then places the results in a distance matrix. Sequence similarity is shown in the bottom half of the dividing line and sequence identity is shown in the top half of the diagonal dividing line.

[0514] Parameters used in the comparison were:

| Scoring matrix: | Blosum62 |
|---|---|
| First Gap: | 12 |
| Extending gap: | 2 |

[0515] Results of the software analysis are shown in Table B1 for the global similarity and identity over the full length of the polypeptide sequences. Percentage identity is given below the diagonal and percentage similarity is given above the diagonal.

[0516] The percentage identity between the bHLH9 polypeptide sequences of Table B1 can be as low as 21.2% amino acid identity compared to SEQ ID NO: 2.

TABLE B1
MatGAT results for global similarity and identity over the full length of the polypeptide sequences.

| | | 1 | 2 | 3 | 4 | 5 | 6 | 7 | 8 |
|---|---|---|---|---|---|---|---|---|---|
| 1 | A. thaliana_bHLH130_9_AT2G42280 | | 37.4 | 21.7 | 36.5 | 20.7 | 36.8 | 32.5 | 30.9 |
| 2 | A. thaliana_bHLH122_9_AT1G51140 | 53.6 | | 18.8 | 29.8 | 18.1 | 40.5 | 28.7 | 30.3 |
| 3 | B. napus_BPS_9258 | 27.9 | 26.9 | | 30.6 | 40.7 | 19.3 | 35 | 27.6 |
| 4 | G. hirsutum_TA24161_3635 | 50.4 | 45.4 | 35.7 | | 20.4 | 30.5 | 54.3 | 33.5 |
| 5 | G. hybrid_AJ763309 | 24.8 | 23 | 54.5 | 24 | | 16.8 | 22.7 | 19.8 |
| 6 | G. max_BPS_22716 | 52.9 | 55.3 | 25.1 | 44.7 | 20.6 | | 28.6 | 29.2 |
| 7 | G. max_BPS_39182 | 45.7 | 41.2 | 42 | 64.6 | 27.6 | 41.6 | | 37.1 |
| 8 | H. vulgare_TA47636_4513 | 44.6 | 44.3 | 34.3 | 51.4 | 25.8 | 41.1 | 50.3 | |
| 9 | M. truncatula_TA37090_3880 | 35.4 | 30.6 | 63.6 | 32.4 | 57 | 33.5 | 37.8 | 35.3 |
| 10 | O. sativa_LOC_Os02g39140.1 | 43.7 | 40.9 | 35 | 49.5 | 27 | 40.9 | 48.7 | 74.8 |
| 11 | O. sativa_Os01g0900800 | 45 | 45 | 27.4 | 54.5 | 21.2 | 46.4 | 45.5 | 46.8 |
| 12 | P. patens_121037_e_gw1.34.393.1 | 20.3 | 19.5 | 47.6 | 21.6 | 61.6 | 17.7 | 24.8 | 22.5 |
| 13 | P. trichocarpa_scaff_I.1785 | 44.6 | 39.8 | 41 | 44.1 | 36.1 | 39.2 | 48.6 | 46.7 |
| 14 | T. aestivum_TA88301_4565 | 37 | 37.2 | 44.4 | 43.5 | 33.1 | 38.5 | 47.6 | 74.5 |
| 15 | V. vinifera_GSVIVT00001847001 | 34.8 | 31.9 | 56.4 | 38.7 | 44.2 | 30.6 | 40.2 | 38.6 |
| 16 | Z. mays_BPS_3797 | 29.5 | 28.5 | 66.2 | 35.4 | 51 | 29.4 | 39.2 | 45.1 |
| | | 9 | 10 | 11 | 12 | 13 | 14 | 15 | 16 |
| 1 | A. thaliana_bHLH130_9_AT2G42280 | 27.6 | 32.2 | 29.8 | 16.4 | 34.2 | 26.8 | 25.3 | 22.2 |
| 2 | A. thaliana_bHLH122_9_AT1G51140 | 25.5 | 29.3 | 30.3 | 16.7 | 26 | 24.7 | 23.7 | 21.6 |
| 3 | B. napus_BPS_9258 | 46.4 | 28.8 | 21.4 | 34.7 | 31.4 | 35.3 | 41 | 52.8 |
| 4 | G. hirsutum_TA24161_3635 | 26.7 | 37.7 | 41.1 | 16.1 | 32.1 | 30.9 | 29.1 | 28.7 |
| 5 | G. hybrid_AJ763309 | 45.2 | 20.5 | 17.3 | 47.3 | 28.4 | 24.4 | 32.4 | 35.4 |
| 6 | G. max_BPS_22716 | 30.1 | 30 | 32.3 | 14.8 | 30.9 | 26.8 | 22.2 | 21.7 |
| 7 | G. max_BPS_39182 | 28.3 | 36.2 | 35.8 | 19.1 | 32.4 | 35.5 | 28.7 | 30.1 |
| 8 | H. vulgare_TA47636_4513 | 26.6 | 61.4 | 33.8 | 16.1 | 30.7 | 72.7 | 28.1 | 39.5 |
| 9 | M. truncatula_TA37090_3880 | | 26.8 | 22 | 38.6 | 35.6 | 32.8 | 38.8 | 42.5 |
| 10 | O. sativa_LOC_Os02g39140.1 | 37.7 | | 35.6 | 17.8 | 30.7 | 53 | 30.3 | 42 |
| 11 | O. sativa_Os01g0900800 | 28.7 | 43.9 | | 14.7 | 27.1 | 29.4 | 24.3 | 24 |
| 12 | P. patens_121037_e_gw1.34.393.1 | 47 | 23 | 17.8 | | 22.3 | 20.6 | 31.4 | 31.1 |
| 13 | P. trichocarpa_scaff_I.1785 | 45.1 | 45.3 | 37.2 | 29.5 | | 37 | 34.3 | 30.3 |
| 14 | T. aestivum_TA88301_4565 | 44.4 | 64 | 37.2 | 28 | 56.6 | | 33.5 | 49.4 |
| 15 | V. vinifera_GSVIVT00001847001 | 53.6 | 41.3 | 30.7 | 40.3 | 49.2 | 47.3 | | 38.5 |
| 16 | Z. mays_BPS_3797 | 61.1 | 46.7 | 30.2 | 41.4 | 43.9 | 56.9 | 55.8 | |

### 3.2. Imbibition-Inducible 1 (IMB1)

[0517] Global percentages of similarity and identity between full length polypeptide sequences useful in performing the methods of the invention were determined using one of the methods available in the art, the MatGAT (Matrix Global Alignment Tool) software (BMC Bioinformatics. 2003 4:29. MatGAT: an application that generates similarity/identity matrices using protein or DNA sequences. Campanella J J, Bitincka L, Smalley J; software hosted by Ledion Bitincka). MatGAT software generates similarity/identity matrices for DNA or protein sequences without needing pre-alignment of the data. The program performs a series of pair-wise alignments using the Myers and Miller global alignment algorithm (with a gap opening penalty of 12, and a gap extension penalty of 2), calculates similarity and identity using for example Blosum 62 (for polypeptides), and then places the results in a distance matrix. Sequence similarity is shown in the bottom half of the dividing line and sequence identity is shown in the top half of the diagonal dividing line.

[0518] Parameters used in the comparison were:

| Scoring matrix: | Blosum62 |
|---|---|
| First Gap: | 12 |
| Extending gap: | 2 |

[0519] Results of the software analysis are shown in Table B2 for the global similarity and identity over the full length of the polypeptide sequences. Percentage identity is given above the diagonal in bold and percentage similarity is given below the diagonal (normal face).

[0520] The percentage identity between the IMB1 polypeptide sequences useful in performing the methods of the invention can be as low as 31% amino acid identity compared to SEQ ID NO: 301. In average, the identity within the cluster of IMB1/GTE1 proteins is 47%; the maximal identity with proteins outside this cluster is 30% and the minimal identity is 8%.

TABLE B2
MatGAT results for global similarity and identity over the
full length of the polypeptide sequences.

| | | 1 | 2 | 3 | 4 | 5 | 6 | 7 | 8 | 9 | 10 |
|---|---|---|---|---|---|---|---|---|---|---|---|
| 1 | A. thaliana_AT2G34900_GTE1 | | 40.1 | 44.6 | 51.4 | 28.4 | 51.4 | 29.2 | 45.6 | 31 | 45.3 |
| 2 | A. thaliana_AT3G52280_GTE6 | 58.8 | | 50 | 48.7 | 36.4 | 48.4 | 30.9 | 44.2 | 29.1 | 39.6 |
| 3 | C. solstitialis_TA2829 | 65 | 68.9 | | 59.7 | 36.7 | 59.4 | 34.3 | 51.2 | 32.6 | 45.3 |
| 4 | G. hirsutum_TA31156 | 69.4 | 67.6 | 77.3 | | 35.3 | 96.5 | 35.8 | 56.6 | 34 | 47.9 |
| 5 | G. raimondii_CO070884 | 37.3 | 44.2 | 46.9 | 42.5 | | 36.6 | 61.4 | 35 | 23.5 | 27.6 |
| 6 | G. raimondii_TA13411 | 69.7 | 66.3 | 77.3 | 96.8 | 44.1 | | 35.5 | 56.6 | 34.9 | 46.8 |
| 7 | L. saligna_DW067496 | 40.7 | 42 | 45.3 | 45.5 | 75.2 | 45.5 | | 34.5 | 25.3 | 28.5 |
| 8 | M. truncatula_AC174355 | 66.8 | 64 | 70.2 | 72.7 | 43.4 | 72.7 | 43.1 | | 36 | 45.3 |
| 9 | M. truncatula_GTE1302 | 49.2 | 49.1 | 53.4 | 53.7 | 34 | 52.9 | 36.5 | 52.6 | | 30 |
| 10 | O. sativa_GTE2201 | 63.5 | 61.5 | 64.9 | 63.6 | 38.1 | 62.6 | 39.2 | 64.5 | 48.6 | |
| 11 | O. sativa_GTE701 | 63.5 | 61.5 | 64.9 | 63.6 | 38.1 | 62.6 | 39.2 | 64.5 | 48.6 | 100 |
| 12 | P. patens_GTE1501 | 44.3 | 42.9 | 43.1 | 44.3 | 30.9 | 44.3 | 28.8 | 43.9 | 35.6 | 40.4 |
| 13 | P. patens_GTE1502 | 54.8 | 57.1 | 57.6 | 56.8 | 40.4 | 55.8 | 38 | 55.8 | 43.7 | 54.3 |
| 14 | P. patens_GTE1505 | 45.9 | 45.5 | 50.1 | 48.4 | 29.9 | 47.9 | 34 | 49.3 | 41.2 | 46.4 |
| 15 | P. trichocarpa_GTE907 | 69.2 | 66.9 | 79.4 | 77.3 | 47.1 | 77.6 | 45.8 | 71.6 | 49.5 | 65.1 |
| 16 | P. trichocarpa_GTE908 | 71.2 | 66.8 | 80.4 | 75.9 | 47 | 76.5 | 45.9 | 72.7 | 53.8 | 69.5 |
| 17 | P. trichocarpa_GTE909 | 66.8 | 62.3 | 72.1 | 76.1 | 40.3 | 75.9 | 41.6 | 70.3 | 51.2 | 59.4 |
| 18 | S. bicolor_TA26028 | 62.4 | 61.2 | 65.4 | 61 | 38.4 | 62.3 | 39.3 | 61.8 | 48.2 | 81.7 |
| 19 | S. lycopersicum_TA45339 | 70.5 | 67.5 | 78.8 | 77.5 | 46.8 | 78 | 49.5 | 71.2 | 51.3 | 67.7 |
| 20 | T. aestivum_TA83944 | 61.4 | 58.5 | 64.1 | 61.5 | 38.2 | 64.4 | 40.2 | 62.1 | 48.5 | 80.3 |
| 21 | V. vinifera_GSVIVT02627001 | 63.9 | 57.3 | 70.3 | 68 | 40.4 | 68.7 | 40 | 63.9 | 46.6 | 61.2 |
| 22 | V. vinifera_GSVIVT08344001 | 57 | 53.9 | 64.1 | 63.6 | 34.5 | 63.6 | 39.1 | 59.1 | 48.2 | 59.4 |
| 23 | Z. mays_GTE110 | 59.6 | 60.4 | 61.9 | 59.1 | 36.9 | 60.7 | 38.3 | 59.6 | 47.8 | 77.2 |
| | | 11 | 12 | 13 | 14 | 15 | 16 | 17 | 18 | 19 | 20 |
| 1 | A. thaliana_AT2G34900_GTE1 | 45.3 | 30.6 | 32.5 | 32.8 | 51.6 | 52.5 | 47.2 | 42.3 | 49 | 44.2 |
| 2 | A. thaliana_AT3G52280_GTE6 | 39.6 | 30.3 | 36.1 | 29.8 | 53.4 | 52.5 | 42 | 42.5 | 50 | 42.4 |
| 3 | C. solstitialis_TA2829 | 45.3 | 30.3 | 36.7 | 33.6 | 65.4 | 67.7 | 51.6 | 46.5 | 56.3 | 47.3 |
| 4 | G. hirsutum_TA31156 | 47.9 | 29 | 37.3 | 32.5 | 64.5 | 62.1 | 57.7 | 44.7 | 59.5 | 46 |
| 5 | G. raimondii_CO070884 | 27.6 | 22.1 | 27.5 | 14.9 | 41.6 | 39.5 | 30.3 | 26.1 | 37.3 | 28.1 |
| 6 | G. raimondii_TA13411 | 46.8 | 29.3 | 37.6 | 32.5 | 64.8 | 62.7 | 57.4 | 45.3 | 59.7 | 46.9 |
| 7 | L. saligna_DW067496 | 28.5 | 21.2 | 27.3 | 12.8 | 38.7 | 36.6 | 31.6 | 27.9 | 40.2 | 28.9 |
| 8 | M. truncatula_AC174355 | 45.3 | 30.3 | 35.6 | 31.8 | 54.9 | 55.2 | 48.7 | 43 | 53.8 | 43.8 |
| 9 | M. truncatula_GTE1302 | 30 | 22.7 | 25.6 | 25.6 | 33.5 | 33.9 | 33.6 | 28.7 | 31.9 | 28.6 |
| 10 | O. sativa_GTE2201 | 100 | 28.1 | 36.7 | 31.8 | 47.4 | 51.7 | 41.6 | 69.9 | 45.7 | 66.9 |
| 11 | O. sativa_GTE701 | | 28.1 | 36.7 | 31.8 | 47.4 | 51.7 | 41.6 | 69.9 | 45.7 | 66.9 |
| 12 | P. patens_GTE1501 | 40.4 | | 59 | 41.2 | 31.9 | 33.5 | 28.5 | 26 | 31.9 | 26.9 |
| 13 | P. patens_GTE1502 | 54.3 | 65.8 | | 54.8 | 40.3 | 40.2 | 33.9 | 32.8 | 36.9 | 32.4 |
| 14 | P. patens_GTE1505 | 46.4 | 46 | 59.1 | | 34.4 | 35.2 | 33.6 | 29.8 | 33.3 | 31.3 |
| 15 | P. trichocarpa_GTE907 | 65.1 | 46 | 60.5 | 46.9 | | 82.7 | 54.9 | 48.2 | 67.4 | 48.7 |
| 16 | P. trichocarpa_GTE908 | 69.5 | 45.1 | 57.3 | 48.9 | 88.5 | | 55.1 | 53 | 66.5 | 53.2 |
| 17 | P. trichocarpa_GTE909 | 59.4 | 42.9 | 54.1 | 48 | 74 | 73.7 | | 41.1 | 51 | 42.9 |
| 18 | S. bicolor_TA26028 | 81.7 | 40.4 | 51.9 | 50 | 63.5 | 68.9 | 60.5 | | 45.8 | 66.6 |
| 19 | S. lycopersicum_TA45339 | 67.7 | 45.8 | 58.8 | 48.1 | 83.3 | 81.5 | 71.2 | 65.1 | | 45.8 |
| 20 | T. aestivum_TA83944 | 80.3 | 41.4 | 50.9 | 48.1 | 62.8 | 67 | 60.7 | 79.2 | 64.6 | |
| 21 | V. vinifera_GSVIVT02627001 | 61.2 | 50.9 | 56.4 | 41.1 | 75.3 | 73.1 | 64.6 | 58.4 | 72.1 | 55 |
| 22 | V. vinifera_GSVIVT08344001 | 59.4 | 36.2 | 45.2 | 63 | 66.7 | 69.7 | 61 | 61 | 64.8 | 58.1 |
| 23 | Z. mays_GTE110 | 77.2 | 41.6 | 51.6 | 46.1 | 62 | 66.2 | 58.4 | 88.9 | 62.2 | 72.5 |

| | | 21 | 22 | 23 |
|---|---|---|---|---|
| 1 | A. thaliana_AT2G34900_GTE1 | 45.7 | 42.9 | 40.2 |
| 2 | A. thaliana_AT3G52280_GTE6 | 45.4 | 42.7 | 40.8 |
| 3 | C. solstitialis_TA2829 | 56.6 | 54.3 | 43.4 |
| 4 | G. hirsutum_TA31156 | 56 | 52.7 | 42 |
| 5 | G. raimondii_CO070884 | 35.7 | 23.3 | 25.5 |
| 6 | G. raimondii_TA13411 | 55.8 | 52.4 | 43 |
| 7 | L. saligna_DW067496 | 34 | 25.5 | 27.7 |
| 8 | M. truncatula_AC174355 | 48.9 | 44.8 | 40.9 |
| 9 | M. truncatula_GTE1302 | 31.3 | 32.5 | 28 |
| 10 | O. sativa_GTE2201 | 44.7 | 43.5 | 63.2 |
| 11 | O. sativa_GTE701 | 44.7 | 43.5 | 63.2 |
| 12 | P. patens_GTE1501 | 34.2 | 26.3 | 25.7 |
| 13 | P. patens_GTE1502 | 37.5 | 30.6 | 30.9 |
| 14 | P. patens_GTE1505 | 27.8 | 42.7 | 26.9 |
| 15 | P. trichocarpa_GTE907 | 67 | 59.2 | 45.2 |
| 16 | P. trichocarpa_GTE908 | 65.5 | 63.9 | 48.8 |
| 17 | P. trichocarpa_GTE909 | 49 | 49.3 | 40.3 |
| 18 | S. bicolor_TA26028 | 43.4 | 45.1 | 85.8 |
| 19 | S. lycopersicum_TA45339 | 57.1 | 51.1 | 43.7 |
| 20 | T. aestivum_TA83944 | 42.2 | 43.8 | 59.9 |
| 21 | V. vinifera_GSVIVT02627001 | | 63 | 40.7 |
| 22 | V. vinifera_GSVIVT08344001 | 63.9 | | 41.8 |
| 23 | Z. mays_GTE110 | 55.9 | 55.8 | |

### 3.3. PCD-Like

[0521] Global percentages of similarity and identity between full length polypeptide sequences useful in performing the methods of the invention are determined using one of the methods available in the art, the MatGAT (Matrix Global Alignment Tool) software (BMC Bioinformatics. 2003 4:29. MatGAT: an application that generates similarity/identity matrices using protein or DNA sequences. Campanella J J, Bitincka L, Smalley J; software hosted by Ledion Bitincka). MatGAT software generates similarity/identity matrices for DNA or protein sequences without needing pre-alignment of the data. The program performs a series of pair-wise alignments using the Myers and Miller global alignment algorithm (with a gap opening penalty of 12, and a gap extension penalty of 2), calculates similarity and identity using for example Blosum 62 (for polypeptides), and then places the results in a distance matrix. Sequence similarity is shown in the bottom half of the dividing line and sequence identity is shown in the top half of the diagonal dividing line.

[0522] Parameters used in the comparison were:

| Scoring matrix: | Blosum62 |
|---|---|
| First Gap: | 12 |
| Extending gap: | 2 |

[0523] A MATGAT table for local alignment of a specific domain, or data on % identity/similarity between specific domains may also be generated.

### 3.4. Pseudo Response Regulator Type 2 (PRR2)

[0524] Global percentages of similarity and identity between full length polypeptide sequences useful in performing the methods of the invention were determined using one of the methods available in the art, the MatGAT (Matrix Global Alignment Tool) software (BMC Bioinformatics. 2003 4:29. MatGAT: an application that generates similarity/identity matrices using protein or DNA sequences. Campanella J J, Bitincka L, Smalley J; software hosted by Ledion Bitincka). MatGAT software generates similarity/identity matrices for DNA or protein sequences without needing pre-alignment of the data. The program performs a series of pair-wise alignments using the Myers and Miller global alignment algorithm (with a gap opening penalty of 12, and a gap extension penalty of 2), calculates similarity and identity using for example Blosum 62 (for polypeptides), and then places the results in a distance matrix. Sequence similarity is shown in the bottom half of the dividing line and sequence identity is shown in the top half of the diagonal dividing line.

[0525] Parameters used in the comparison were:

| Scoring matrix: | Blosum62 |
|---|---|
| First Gap: | 12 |
| Extending gap: | 2 |

[0526] Results of the software analysis are shown in Table B3 for the global similarity and identity over the full length of the polypeptide sequences (excluding the partial polypeptide sequences).

[0527] The percentage identity between the full length polypeptide sequences useful in performing the methods of the invention can be as low as 46% amino acid identity compared to SEQ ID NO: 452.

TABLE B3
MatGAT results for global similarity and
identity over the full length of the
polypeptide sequences of Table A4.

| | | 1 | 2 | 3 | 4 | 5 | 6 |
|---|---|---|---|---|---|---|---|
| 1. | Lyces_PRR2 | | 53.8 | 46.5 | 56.5 | 54.9 | 54.5 |
| 2. | Aqufo_PRR2 | 69.1 | | 45.2 | 53.6 | 50.9 | 52.2 |
| 3. | Arath_PRR2 | 62.1 | 61.2 | | 48.3 | 46.1 | 47 |
| 4. | Eucgr_PRR2 | 72.5 | 68.6 | 62.3 | | 57.6 | 58.1 |
| 5. | Glyma_PRR2 | 70.9 | 67.5 | 61.4 | 71.6 | | 77.1 |
| 6. | Lotja_PRR2 | 69.8 | 68.4 | 63.7 | 72.9 | 84.9 | |
| 7. | Medtr_PRR2 | 67.1 | 65.9 | 63.7 | 70 | 81.4 | 82.2 |
| 8. | Poptr_PRR2 I | 73.4 | 71.9 | 65.8 | 74.7 | 72.5 | 74.1 |
| 9. | Poptr_PRR2 II | 72.3 | 72.2 | 64.5 | 72.5 | 70.7 | 72.2 |
| 10. | Solly_PRR2 II | 80.5 | 67.4 | 62.4 | 72.1 | 68.2 | 69.2 |
| 11. | Vitvi_PRR2 | 75.9 | 73.8 | 66.1 | 76.7 | 76 | 76.8 |

| | | 7 | 8 | 9 | 10 | 11 |
|---|---|---|---|---|---|---|
| 1. | Lyces_PRR2 | 52.1 | 58.4 | 56.8 | 68.1 | 60.2 |
| 2. | Aqufo_PRR2 | 50.3 | 56.9 | 56.5 | 51 | 59.9 |
| 3. | Arath_PRR2 | 48.2 | 50.2 | 48.9 | 47.8 | 51.1 |
| 4. | Eucgr_PRR2 | 56.1 | 63.3 | 61 | 56.6 | 65.8 |
| 5. | Glyma_PRR2 | 73.8 | 59.4 | 57.5 | 51.7 | 63.7 |
| 6. | Lotja_PRR2 | 74.5 | 60.9 | 58.9 | 53 | 63.3 |
| 7. | Medtr_PRR2 | | 58.8 | 57.1 | 53.1 | 61.4 |
| 8. | Poptr_PRR2 I | 71 | | 82.2 | 58.7 | 69.5 |
| 9. | Poptr_PRR2 II | 69.6 | 88.5 | | 57.1 | 68.8 |
| 10. | Solly_PRR2 II | 68.3 | 72.1 | 71.2 | | 61.8 |
| 11. | Vitvi_PRR2 | 73.8 | 79.9 | 79.5 | 75.3 | |

[0528] The percentage amino acid identity can be significantly increased if the most conserved region of the polypeptides are compared. For example, when comparing the amino acid sequence of a pseudo response receiver domain as represented by SEQ ID NO: 475, or of a Myb-like DNA binding domain as represented by SEQ ID NO: 476, or of a C-terminal conserved domain as represented by SEQ ID NO: 477 with the respective corresponding domains of the polypeptides of Table A4, the percentage amino acid identity increases significantly (in order of preference at least 50%, 55%, 60%, 65%, 70%, 75%, 80%, 85%, 90%, 95%, 98%, 99% or more amino acid sequence identity).

### Example 4

### Identification of Domains Comprised in Polypeptide Sequences Useful in Performing the Methods of the Invention

[0529] The Integrated Resource of Protein Families, Domains and Sites (InterPro) database is an integrated interface for the commonly used signature databases for text- and sequence-based searches. The InterPro database combines these databases, which use different methodologies and varying degrees of biological information about well-characterized proteins to derive protein signatures. Collaborating databases include SWISS-PROT, PROSITE, TrEMBL, PRINTS, Propom and Pfam, Smart and TIGRFAMs. Pfam is a large collection of multiple sequence alignments and hidden Markov models covering many common protein domains and families. Pfam is hosted at the Sanger Institute server in the United Kingdom. Interpro is hosted at the European Bioinformatics Institute in the United Kingdom.

4.1. basic-Helix-Loop-Helix Group 9 (bHLH9)

[0530] The results of the InterPro scan of the polypeptide sequence as represented by SEQ ID NO: 2 are presented in Table C1.

TABLE C1
InterPro scan results (major accession numbers) of the polypeptide
sequence as represented by SEQ ID NO: 2.

| | | | Amino acid | |
|---|---|---|---|---|
| | | | coordinates | |
| Database | Accession number | Name Domain | T[Start-End] | Evalue |
| InterPro | IPR001092 | Basic helix-loop-helix dimerisation | | |
| | | region bHLH | | |
| HMMPfam | PF00010 | HLH or bHLH | T[318-366] | 6.4E−5 |
| HMMSmart | SM00353 | HLH | T[321-371] | 1.2E−12 |
| ProfileScan | PS50888 | HLH | T[309-366] | 0.0 |
| InterPro | IPR011598 | Helix-loop-helix DNA-binding | | |
| Gene3D | G3DSA:4.10.280.10 | HLH_DNA_bd | T[311-377] | 7.4E−5 |
| Superfamily | SSF47459 | HLH_basic | T[311-385] | 2.2E−12 |

[0531] Additionally, comparison of SEQ ID NO: 2 (O. sativa_Os01g0900800) with other bHLH9 polypeptides sequences of Table A1 allowed identification of the highly conserved HLH domain in said bHLH9 polypeptides. Table C2 gives the amino acid sequence of the HLH domain as present in bHLH9 polypeptides polypeptides of Table A1.

TABLE C2
Amino acid sequence of the HLH domain in bHLH9 polypeptides.

| | bHLH9 | |
|---|---|---|
| | polypeptide | HLH domain |
| bHLH9 polypeptide | SEQ ID NO: | SEQ ID NO: |
| O. sativa_Os01g0900800 | 2 | 225 |
| A. thaliana_bHLH130_9_AT2G42280 | 4 | 181 |
| A. thaliana_bHLH122_9_AT1G51140 | 6 | 182 |
| A. thaliana_bHLH081_9_AT4G09180 | 8 | 183 |
| A. thaliana_bHLH080_9_AT1G35460 | 10 | 184 |
| A. thaliana_bHLH128_9_AT1G05805 | 12 | 185 |
| A. thaliana_bHLH129_9_AT2G43140 | 14 | 186 |
| B. napus_BPS_9258 | 20 | 187 |
| B. oleracea_EH428573 | 22 | 188 |
| B. oleracea_TA6610_3712 | 24 | 189 |
| C. clementina_TA5735_85681 | 26 | 190 |
| C. intybus_EH689338 | 28 | 191 |
| C. obtusa_BW987363 | 30 | 192 |
| C. sinensis_TA15236_2711 | 32 | 193 |
| C. sinensis_TA15331_2711 | 34 | 194 |
| C. solstitialis_EH761577 | 36 | 195 |
| C. tinctorius_EL407531 | 38 | 196 |
| E. esula_TA10959_3993 | 40 | 197 |
| G. hirsutum_TA24161_3635 | 42 | 198 |
| G. hybrid_AJ763309 | 44 | 199 |
| G. max_BPS_22716 | 46 | 200 |
| G. max_BPS_39182 | 48 | 201 |
| G. max_TA56453_3847 | 50 | 202 |
| G. max_TA57335_3847 | 52 | 203 |
| G. max_TA63030_3847 | 54 | 204 |
| G. raimondii_TA12344_29730 | 56 | 205 |
| G. soja_CA783858 | 58 | 206 |
| H. ciliaris_EL431737 | 60 | 207 |
| H. paradoxus_EL487892 | 62 | 208 |
| H. petiolaris_DY944559 | 64 | 209 |
| H. vulgare_TA45248_4513 | 66 | 210 |
| H. vulgare_TA47636_4513 | 68 | 211 |
| I. nil_TA15694_35883 | 70 | 212 |
| I. nil_TA8920_35883 | 72 | 213 |
| I. nil_TA9081_35883 | 74 | 214 |
| I. nil_TA9289_35883 | 76 | 215 |
| L. saligna_TA4923_75948 | 78 | 216 |
| L. sativa_TA5039_4236 | 80 | 217 |
| L. serriola_DW114802 | 82 | 218 |
| M. truncatula_AC141114_16.2 | 84 | 219 |
| M. truncatula_AC149471_36.2 | 86 | 220 |
| M. truncatula_TA37090_3880 | 88 | 221 |
| N. benthamiana_TA8284_4100 | 90 | 222 |
| N. benthamiana_TA8285_4100 | 92 | 223 |
| O. sativa_LOC_Os02g39140.1 | 94 | 224 |
| O. sativa_Os04g0489600 | 96 | 226 |
| O. sativa_Os08g0506700 | 98 | 227 |
| O. sativa_Os09g0487900 | 100 | 228 |
| P. patens_121037_e_gw1.34.393.1 | 102 | 229 |
| P. patens_148201_e_gw1.273.42.1 | 104 | 230 |
| P. patens_TA27139_3218 | 106 | 231 |
| P. patens_TA32785_3218 | 108 | 232 |
| P. taeda_TA15788_3352 | 110 | 233 |
| P. tremula_DN488299 | 112 | 234 |
| P. tremula_TA18674_47664 | 114 | 235 |
| P. trichocarpa_scaff_I.1785 | 116 | 236 |
| P. trichocarpa_scaff_III.1580 | 118 | 237 |
| P. trichocarpa_scaff_IX.1004 | 120 | 238 |
| P. trichocarpa_scaff_XIV.978 | 122 | 239 |
| P. trichocarpa_scaff_XIX.717 | 124 | 240 |
| P. trichocarpa_scaff_XVI.437 | 126 | 241 |
| R. communis_EG683575 | 128 | 242 |
| S. bicolor_TA33134_4558 | 130 | 243 |
| S. lycopersicum_TA38189_4081 | 132 | 244 |
| S. lycopersicum_TA46743_4081 | 134 | 245 |
| S. officinarum_CA143325 | 136 | 246 |
| S. officinarum_TA45654_4547 | 138 | 247 |
| S. tuberosum_CV506096 | 140 | 248 |
| S. tuberosum_TA26686_4113 | 142 | 249 |
| S. tuberosum_TA29368_4113 | 144 | 250 |
| S. tuberosum_TA37004_4113 | 146 | 251 |
| S. tuberosum_TA40158_4113 | 148 | 252 |
| T. aestivum_TA88301_4565 | 150 | 253 |
| T. officinale_DY832981 | 152 | 254 |
| V. vinifera_GSVIVT00001847001 | 154 | 255 |
| V. vinifera_GSVIVT00005670001 | 156 | 256 |
| V. vinifera_GSVIVT00008845001 | 158 | 257 |
| V. vinifera_GSVIVT00024649001 | 160 | 258 |
| V. vinifera_GSVIVT00025522001 | 162 | 259 |
| V. vinifera_TA49422_29760 | 164 | 260 |
| Z. mays_BPS_3797 | 166 | 261 |
| Z. mays_BPS_30292 | 168 | 262 |
| Z. mays_BPS_52761 | 170 | 263 |
| Z. mays_TA16655_4577999 | 172 | 264 |
| Z. officinale_TA2571_94328 | 174 | 265 |
| Z. officinale_TA334_94328 | 176 | 266 |
| Z. officinale_TA5709_94328 | 178 | 267 |
| Z. officinale_TA6615_94328 | 180 | 268 |

### 4.2. Imbibition-Inducible 1 (IMB1)

[0532] The results of the InterPro scan of the polypeptide sequence as represented by SEQ ID NO: 301 are presented in Table C3.

TABLE C3
InterPro scan results (major accession numbers) of the polypeptide
sequence as represented by SEQ ID NO: 301.

| | | | Amino acid |
|---|---|---|---|
| | | | coordinates |
| | | | on SEQ |
| Database | Accession number | Accession name | ID NO 301 |
| InterPro | IPR001487 | Bromodomain | |
| FPrintScan | PR00503 | BROMODOMAIN | T[114-127] |
| | | | T[130-146] |
| | | | T[167-186] |
| Gene3D | G3DSA:1.20.920.10 | no description | T[75-234] |
| HMMPfam | PF00439 | Bromodomain | T[99-191] |
| HMMSmart | SM00297 | no description | T[92-205] |
| superfamily | SSF47370 | Bromodomain | T[73-216] |

### 4.3. PCD-Like

[0533] The protein sequences representing the GRP are used as query to search the InterPro database.

### 4.4. Pseudo Response Regulator Type 2 (PRR2)

[0534] The results of the InterPro scan of the polypeptide sequence as represented by SEQ ID NO: 452 are presented in Table C4.

TABLE C4
InterPro scan results of the polypeptide sequence as
represented by SEQ ID NO: 452

| | | Integrated | |
|---|---|---|---|
| InterPro accession number | Integrated | database | Integrated database |
| and name | database name | accession number | accession name |
| IPR001789 | ProDOM | PD000039 | Q9LKL2_Arath |
| Signal transduction response | | | |
| regulator, receiver region | | | |
| | PFAM | PF00072 | Response_reg |
| | SMART | SM00448 | REC |
| IPR006447 | TIGR | TIGR01557 | Myb_SHAQKYF; |
| Myb-like DNA-binding region, | | | myb-like DNA binding |
| SHAKYF | | | domain |
| IPR012287 | G3DSA | G3DSA/1.10.10.60 | No description |
| Homeo-domain related | | | |
| IPR014778 | PFAM | PF00249 | Myb_DNA-binding |
| Myb, DNA-binding | | | |

### Example 5

### Topology Prediction of the Polypeptide Sequences Useful in Performing the Methods of the Invention

### 5.1. Imbibition-Inducible 1 (IMB1)

[0535] TargetP 1.1 predicts the subcellular location of eukaryotic proteins. The location assignment is based on the predicted presence of any of the N-terminal pre-sequences: chloroplast transit peptide (cTP), mitochondrial targeting peptide (mTP) or secretory pathway signal peptide (SP). Scores on which the final prediction is based are not really probabilities, and they do not necessarily add to one. However, the location with the highest score is the most likely according to TargetP, and the relationship between the scores (the reliability class) may be an indication of how certain the prediction is. The reliability class (RC) ranges from 1 to 5, where 1 indicates the strongest prediction. TargetP is maintained at the server of the Technical University of Denmark.

[0536] For the sequences predicted to contain an N-terminal presequence a potential cleavage site can also be predicted.

[0537] A number of parameters were selected, such as organism group (non-plant or plant), cutoff sets (none, predefined set of cutoffs, or user-specified set of cutoffs), and the calculation of prediction of cleavage sites (yes or no).

[0538] The results of TargetP 1.1 analysis of the polypeptide sequence as represented by SEQ ID NO: 301 are presented Table D1. The “plant” organism group has been selected, no cutoffs defined, and the predicted length of the transit peptide requested. The subcellular localization of the polypeptide sequence as represented by SEQ ID NO: 2 may be the cytoplasm or nucleus, no transit peptide is predicted.

TABLE D1
TargetP 1.1 analysis of the polypeptide
sequence as represented by SEQ ID NO: 301.

| Name | Len | cTP | mTP | SP | other | Loc | RC | TPlen |
|---|---|---|---|---|---|---|---|---|
| Le_IMB1 | 378 | 0.080 | 0.110 | 0.033 | 0.921 | — | 1 | — |
| cutoff | | 0.000 | 0.000 | 0.000 | 0.000 | | | |

Abbreviations: Len, Length;
cTP, Chloroplastic transit peptide;
mTP, Mitochondrial transit peptide,
SP, Secretory pathway signal peptide,
other, Other subcellular targeting,
Loc, Predicted Location;
RC, Reliability class;
TPlen, Predicted transit peptide length.

[0539] When analysed with other algorithms, a nuclear localisation is predicted, in line with the function as transcription factor.

[0540] Many other algorithms can be used to perform such analyses, including:
[0541] ChloroP 1.1 hosted on the server of the Technical University of Denmark;
[0542] Protein Prowler Subcellular Localisation Predictor version 1.2 hosted on the server of the Institute for Molecular Bioscience, University of Queensland, Brisbane, Australia;
[0543] PENCE Proteome Analyst PA-GOSUB 2.5 hosted on the server of the University of Alberta, Edmonton, Alberta, Canada;
[0544] TMHMM, hosted on the server of the Technical University of Denmark
[0545] PSORT (URL: psort.org)
[0546] PLOC (Park and Kanehisa, Bioinformatics, 19, 1656-1663, 2003).

### 5.2. PCD-Like

[0547] TargetP 1.1 predicts the subcellular location of eukaryotic proteins. The location assignment is based on the predicted presence of any of the N-terminal pre-sequences: chloroplast transit peptide (cTP), mitochondrial targeting peptide (mTP) or secretory pathway signal peptide (SP). Scores on which the final prediction is based are not really probabilities, and they do not necessarily add to one. However, the location with the highest score is the most likely according to TargetP, and the relationship between the scores (the reliability class) may be an indication of how certain the prediction is. The reliability class (RC) ranges from 1 to 5, where 1 indicates the strongest prediction. TargetP is maintained at the server of the Technical University of Denmark.

[0548] For the sequences predicted to contain an N-terminal presequence a potential cleavage site can also be predicted.

[0549] A number of parameters were selected, such as organism group (non-plant or plant), cutoff sets (none, predefined set of cutoffs, or user-specified set of cutoffs), and the calculation of prediction of cleavage sites (yes or no).

[0550] The protein sequences representing the GRP are used to query TargetP 1.1. The “plant” organism group is selected, no cutoffs defined, and the predicted length of the transit peptide requested.

[0551] Many other algorithms can be used to perform such analyses, including:
[0552] ChloroP 1.1 hosted on the server of the Technical University of Denmark;
[0553] Protein Prowler Subcellular Localisation Predictor version 1.2 hosted on the server of the Institute for Molecular Bioscience, University of Queensland, Brisbane, Australia;
[0554] PENCE Proteome Analyst PA-GOSUB 2.5 hosted on the server of the University of Alberta, Edmonton, Alberta, Canada;
[0555] TMHMM, hosted on the server of the Technical University of Denmark

### Example 6

### Subcellular Localisation Prediction of the Polypeptide Sequences Useful in Performing the Methods of the Invention

### 6.1. Pseudo Response Regulator Type 2 (PRR2)

[0556] Experimental methods for protein localization range from immunolocalization to tagging of proteins using green fluorescent protein (GFP) or beta-glucuronidase (GUS). Such methods to identify subcellular compartmentalisation of GRF polypeptides are well known in the art.

[0557] A predicted nuclear localisation signal (NLS) was found by multiple sequence alignment, followed by eye inspection, in the polypeptide sequences of Table A4 (for SEQ ID NO: 452 KSNRKKIK). An NLS is one or more short sequences of positively charged lysines or arginines.

[0558] Computational prediction of protein localisation from sequence data was performed. Among algorithms well known to a person skilled in the art are available at the ExPASy Proteomics tools hosted by the Swiss Institute for Bioinformatics, for example, PSort, TargetP, ChloroP, LocTree, Predotar, LipoP, MITOPROT, PATS, PTS1, SignalP, TMHMM, TMpred, and others.

### Example 7

### Assay Related to the Polypeptide Sequences Useful in Performing the Methods of the Invention

### 7.1. Imbibition-Inducible 1 (IMB1)

[0559] Chua et al. (2005) describe a chromatin immunoprecipitation (ChIP) assay for analysing the functionality of an IMB1 polypeptide (in casu GTE6 fused to GFP and the AS1 promoter). AS1 transcripts were increased in the 35S::GTE6-GFP plants, as well as in the 35S::GTE6 plants, indicating that both GTE6-GFP and GTE6 upregulated the expression of AS1.

[0560] Approximately 0.1-0.8 g leaves of 21-d-old Arabidopsis plants grown on 1/2 MS agar in tissue culture plates were fixed with 1% formaldehyde (Sigma) under vacuum for 15 min. The plant material was ground in liquid nitrogen, and chromatin was extracted. The chromatin was sheared into fragments ranging from 400 bp to 1 kbp by sonication. The sonicated chromatin was immunoprecipitated with 10 μL of anti-acetylated histone H4 (Upstate Biotechnology), 10 μL of anti-acetylated histone H3 (Upstate Biotechnology), or 5 μL of anti-GFP (Abcam). DNA was amplified using primers specific for 18S rDNA, and various regions of AS1. PCR reactions were first performed with various dilutions of the template DNA to ensure that the PCR conditions were within the quantitative range of the amplification reaction. Co-precipitated DNA was dissolved in 20 μL of TE, and typically 1 μL was used for PCR analyses. For total input samples, DNA was extracted from an aliquot of sonicated chromatin, dissolved in 80 μL of TE, and 1 μL was used for PCR. Twenty-eight cycles were used to amplify the various regions of AS1, and 20 cycles were used to amplify the 18S rDNA sequence. Regions of AS1 were first amplified using AS1 primers for 8 cycles, followed by the addition of 18S rDNA primers, and the PCR was performed for another 20 cycles. In three independently transformed lines of 35S::GTE6-GFP plants, the GFP antibodies coprecipitated the promoter, and the 3′ end of the intron and the 5′ end of exon 2 of AS1. The GFP antibodies did not coprecipitate regions P3 and P0 of AS1; these sequences were undetected even after forty rounds of PCR. GTE6 thus regulates expression by associating with a 1-kbp region containing the promoter and the start of the transcribed region of AS1, which are likely to be important regulatory regions for transcriptional control.

### 7.2. Pseudo Response Regulator Type 2 (PRR2)

[0561] PRR2 polypeptides useful in the methods of the present invention (at least in their native form) typically, but not necessarily, have transcriptional regulatory activity and capacity to interact with other proteins. DNA-binding activity and protein-protein interactions may readily be determined in vitro or in vivo using techniques well known in the art (for example in Current Protocols in Molecular Biology, Volumes 1 and 2, Ausubel et al. (1994), Current Protocols). PRR2 domains contain a Myb DNA-binding of the SHAQYKF.

### Example 8

### Cloning of the Nucleic Acid Sequence Used in the Methods of the Invention

[0562] 8.1. basic-Helix-Loop-Helix Group 9 (bHLH9)

[0563] The nucleic acid sequence used in the methods of the invention was amplified by PCR using as template a custom-made Oryza sativa seedlings cDNA library (in pCMV Sport 6.0; Invitrogen, Paisley, UK). PCR was performed using Hifi Taq DNA polymerase in standard conditions, using 200 ng of template in a 50 μl PCR mix. The primers used were 5′-gggga caagtttgtacaaaaaagcaggcttaaacaatgaacaggatgacggc-3′ (SEQ ID NO: 271; sense), and 5′-ggggaccactttgtacaagaaagctgggtttacaacattagctcggaga-3′ (SEQ ID NO: 272; reverse, complementary) which include the AttB sites for Gateway recombination. The amplified PCR fragment was purified also using standard methods. The first step of the Gateway procedure, the BP reaction, was then performed, during which the PCR fragment recombined in vivo with the pDONR201 plasmid to produce, according to the Gateway terminology, an “entry clone”, pbHLH9. Plasmid pDONR201 was purchased from Invitrogen, as part of the Gateway® technology.

[0564] The entry clone comprising the longest ORF (open reading frame) in SEQ ID NO: 1 was then used in an LR reaction with a destination vector used for Oryza sativa transformation. This vector contained as functional elements within the T-DNA borders: a plant selectable marker; a screenable marker expression cassette; and a Gateway cassette intended for LR in vivo recombination with the nucleic acid sequence of interest already cloned in the entry clone. A rice GOS2 promoter (SEQ ID NO: 275) for constitutive specific expression was located upstream of this Gateway cassette.

[0565] After the LR recombination step, the resulting expression vector pGOS2::bHLH9 (FIG. 3) was transformed into Agrobacterium strain LBA4044 according to methods well known in the art.

### 8.2. Imbibition-Inducible 1 (IMB1)

[0566] The nucleic acid sequence used in the methods of the invention was amplified by PCR using as template a custom-made Solanum lycopersicum seedlings cDNA library (in pCMV Sport 6.0; Invitrogen, Paisley, UK). PCR was performed using Hifi Taq DNA polymerase in standard conditions, using 200 ng of template in a 50 μl PCR mix. The primers used were prm10548 (SEQ ID NO: 302; sense, start codon in bold): 5′-ggggacaagtttgt acaaaaaagcaggct taaacaatggagaatctaaacggctta-3′ and prm10549 (SEQ ID NO: 303; reverse, complementary): 5′-ggggaccactttgtacaagaaagctgggtgtaaaatcaggatggcttttt-3′, which include the AttB sites for Gateway recombination. The amplified PCR fragment was purified also using standard methods. The first step of the Gateway procedure, the BP reaction, was then performed, during which the PCR fragment recombined in vivo with the pDONR201 plasmid to produce, according to the Gateway terminology, an “entry clone”, pIMB1. Plasmid pDONR201 was purchased from Invitrogen, as part of the Gateway® technology.

[0567] The entry clone comprising SEQ ID NO: 300 was then used in an LR reaction with a destination vector used for Oryza sativa transformation. This vector contained as functional elements within the T-DNA borders: a plant selectable marker; a screenable marker expression cassette; and a Gateway cassette intended for LR in vivo recombination with the nucleic acid sequence of interest already cloned in the entry clone. A rice GOS2 promoter (SEQ ID NO: 313) for constitutive specific expression was located upstream of this Gateway cassette.

[0568] After the LR recombination step, the resulting expression vector pGOS2::IMB1 (FIG. 7) was transformed into Agrobacterium strain LBA4044 according to methods well known in the art.

### 8.3. PCD-Like

[0569] The nucleic acid sequence used in the methods of the invention was amplified by PCR using as template a custom-made Oryza sativa seedlings cDNA library (in pCMV Sport 6.0; Invitrogen, Paisley, UK). PCR was performed using Hifi Taq DNA polymerase in standard conditions, using 200 ng of template in a 50 μl PCR mix. The primers used had a sequence as represented by SEQ ID NO: 448; sense, start codon in bold): 5′-ggggacaagtttgtacaa aaaagcaggcttaaacaatggcgctcaccaacc-3′ and SEQ ID NO: 449 (reverse, complementary): 5′-ggggaccactttgtacaagaaagctgggtaaggggatatatgtgaatgaaga-3′, which include the AttB sites for Gateway recombination. The amplified PCR fragment was purified also using standard methods. The first step of the Gateway procedure, the BP reaction, was then performed, during which the PCR fragment recombined in vivo with the pDONR201 plasmid to produce, according to the Gateway terminology, an “entry clone”, pPCD. Plasmid pDONR201 was purchased from Invitrogen, as part of the Gateway® technology.

[0570] The entry clone comprising the longest Open Redeading Frame (ORF) in SEQ ID NO: 358 was then used in an LR reaction with a destination vector used for Oryza sativa transformation. This vector contained as functional elements within the T-DNA borders: a plant selectable marker; a screenable marker expression cassette; and a Gateway cassette intended for LR in vivo recombination with the nucleic acid sequence of interest already cloned in the entry clone. A rice GOS2 promoter (SEQ ID NO: 450) for constitutive specific expression was located upstream of this Gateway cassette.

[0571] After the LR recombination step, the resulting expression vector pGOS2::PCD (FIG. 10) was transformed into Agrobacterium strain LBA4044 according to methods well known in the art.

### 8.4. Pseudo Response Regulator Type 2 (PRR2)

[0572] The Lycopersicon esculentum nucleic acid sequence encoding a PRR2 polypeptide sequence as represented by SEQ ID NO: 2 was amplified by PCR using as template a cDNA bank constructed using RNA from tomato plants at different developmental stages.

[0573] The following primers, which include the AttB sites for Gateway recombination, were used for PCR amplification: prm10843 (SEQ ID NO: 479, sense): 5′-ggggacaagtttgtacaaaaaag caggcttaaacaatgatttgcattgagaatgaa-3′ and prm10844 (SEQ ID NO: 480, reverse, complementary): 5′-ggggaccactttgtacaagaaagctgggtacatgtcatctcatctccgac-3′. PCR was performed using Hifi Taq DNA polymerase in standard conditions. A PCR fragment of the expected length (including attB sites) was amplified and purified also using standard methods. The first step of the Gateway procedure, the BP reaction, was then performed, during which the PCR fragment recombined in vivo with the pDONR201 plasmid to produce, according to the Gateway terminology, an “entry clone”. Plasmid pDONR201 was purchased from Invitrogen, as part of the Gateway® technology.

[0574] The entry clone comprising SEQ ID NO: 451 was subsequently used in an LR reaction with a destination vector used for Oryza sativa transformation. This vector contained as functional elements within the T-DNA borders: a plant selectable marker; a screenable marker expression cassette; and a Gateway cassette intended for LR in vivo recombination with the nucleic acid sequence of interest already cloned in the entry clone. A rice GOS2 promoter (SEQ ID NO: 478) for constitutive expression was located upstream of this Gateway cassette.

[0575] After the LR recombination step, the resulting expression vector pGOS2::PRR2 (FIG. 14) for constitutve expression, was transformed into Agrobacterium strain LBA4044 according to methods well known in the art.

### Example 9

### Plant Transformation

### Rice Transformation

[0576] The Agrobacterium containing the expression vector was used to transform Oryza sativa plants. Mature dry seeds of the rice japonica cultivar Nipponbare were dehusked. Sterilization was carried out by incubating for one minute in 70% ethanol, followed by 30 minutes in 0.2% HgCl₂, followed by a 6 times 15 minutes wash with sterile distilled water. The sterile seeds were then germinated on a medium containing 2,4-D (callus induction medium). After incubation in the dark for four weeks, embryogenic, scutellum-derived calli were excised and propagated on the same medium. After two weeks, the calli were multiplied or propagated by subculture on the same medium for another 2 weeks. Embryogenic callus pieces were sub-cultured on fresh medium 3 days before co-cultivation (to boost cell division activity).

[0577] Agrobacterium strain LBA4404 containing the expression vector was used for co-cultivation. Agrobacterium was inoculated on AB medium with the appropriate antibiotics and cultured for 3 days at 28° C. The bacteria were then collected and suspended in liquid co-cultivation medium to a density (OD₆₀₀) of about 1. The suspension was then transferred to a Petri dish and the calli immersed in the suspension for 15 minutes. The callus tissues were then blotted dry on a filter paper and transferred to solidified, co-cultivation medium and incubated for 3 days in the dark at 25° C. Co-cultivated calli were grown on 2,4-D-containing medium for 4 weeks in the dark at 28° C. in the presence of a selection agent. During this period, rapidly growing resistant callus islands developed. After transfer of this material to a regeneration medium and incubation in the light, the embryogenic potential was released and shoots developed in the next four to five weeks. Shoots were excised from the calli and incubated for 2 to 3 weeks on an auxin-containing medium from which they were transferred to soil. Hardened shoots were grown under high humidity and short days in a greenhouse.

[0578] Approximately 35 independent T0 rice transformants were generated for one construct. The primary transformants were transferred from a tissue culture chamber to a greenhouse. After a quantitative PCR analysis to verify copy number of the T-DNA insert, only single copy transgenic plants that exhibit tolerance to the selection agent were kept for harvest of T1 seed. Seeds were then harvested three to five months after transplanting. The method yielded single locus transformants at a rate of over 50% (Aldemita and Hodges 1996, Chan et al. 1993, Hiei et al. 1994).

### Corn Transformation

[0579] Transformation of maize (Zea mays) is performed with a modification of the method described by Ishida et al. (1996) Nature Biotech 14(6): 745-50. Transformation is genotype-dependent in corn and only specific genotypes are amenable to transformation and regeneration. The inbred line A188 (University of Minnesota) or hybrids with A188 as a parent are good sources of donor material for transformation, but other genotypes can be used successfully as well. Ears are harvested from corn plant approximately 11 days after pollination (DAP) when the length of the immature embryo is about 1 to 1.2 mm. Immature embryos are cocultivated with Agrobacterium tumefaciens containing the expression vector, and transgenic plants are recovered through organogenesis. Excised embryos are grown on callus induction medium, then maize regeneration medium, containing the selection agent (for example imidazolinone but various selection markers can be used). The Petri plates are incubated in the light at 25° C. for 2-3 weeks, or until shoots develop. The green shoots are transferred from each embryo to maize rooting medium and incubated at 25° C. for 2-3 weeks, until roots develop. The rooted shoots are transplanted to soil in the greenhouse. T1 seeds are produced from plants that exhibit tolerance to the selection agent and that contain a single copy of the T-DNA insert.

### Wheat Transformation

[0580] Transformation of wheat is performed with the method described by Ishida et al. (1996) Nature Biotech 14(6): 745-50. The cultivar Bobwhite (available from CIMMYT, Mexico) is commonly used in transformation. Immature embryos are co-cultivated with Agrobacterium tumefaciens containing the expression vector, and transgenic plants are recovered through organogenesis. After incubation with Agrobacterium, the embryos are grown in vitro on callus induction medium, then regeneration medium, containing the selection agent (for example imidazolinone but various selection markers can be used). The Petri plates are incubated in the light at 25° C. for 2-3 weeks, or until shoots develop. The green shoots are transferred from each embryo to rooting medium and incubated at 25° C. for 2-3 weeks, until roots develop. The rooted shoots are transplanted to soil in the greenhouse. T1 seeds are produced from plants that exhibit tolerance to the selection agent and that contain a single copy of the T-DNA insert.

### Soybean Transformation

[0581] Soybean is transformed according to a modification of the method described in the Texas A&M U.S. Pat. No. 5,164,310. Several commercial soybean varieties are amenable to transformation by this method. The cultivar Jack (available from the Illinois Seed foundation) is commonly used for transformation. Soybean seeds are sterilised for in vitro sowing. The hypocotyl, the radicle and one cotyledon are excised from seven-day old young seedlings. The epicotyl and the remaining cotyledon are further grown to develop axillary nodes. These axillary nodes are excised and incubated with Agrobacterium tumefaciens containing the expression vector. After the cocultivation treatment, the explants are washed and transferred to selection media. Regenerated shoots are excised and placed on a shoot elongation medium. Shoots no longer than 1 cm are placed on rooting medium until roots develop. The rooted shoots are transplanted to soil in the greenhouse. T1 seeds are produced from plants that exhibit tolerance to the selection agent and that contain a single copy of the T-DNA insert.

### Rapeseed/Canola Transformation

[0582] Cotyledonary petioles and hypocotyls of 5-6 day old young seedling are used as explants for tissue culture and transformed according to Babic et al. (1998, Plant Cell Rep 17: 183-188). The commercial cultivar Westar (Agriculture Canada) is the standard variety used for transformation, but other varieties can also be used. Canola seeds are surface-sterilized for in vitro sowing. The cotyledon petiole explants with the cotyledon attached are excised from the in vitro seedlings, and inoculated with Agrobacterium (containing the expression vector) by dipping the cut end of the petiole explant into the bacterial suspension. The explants are then cultured for 2 days on MSBAP-3 medium containing 3 mg/l BAP, 3% sucrose, 0.7% Phytagar at 23° C., 16 hr light. After two days of co-cultivation with Agrobacterium, the petiole explants are transferred to MSBAP-3 medium containing 3 mg/l BAP, cefotaxime, carbenicillin, or timentin (300 mg/l) for 7 days, and then cultured on MSBAP-3 medium with cefotaxime, carbenicillin, or timentin and selection agent until shoot regeneration. When the shoots are 5-10 mm in length, they are cut and transferred to shoot elongation medium (MSBAP-0.5, containing 0.5 mg/l BAP). Shoots of about 2 cm in length are transferred to the rooting medium (MS0) for root induction. The rooted shoots are transplanted to soil in the greenhouse. T1 seeds are produced from plants that exhibit tolerance to the selection agent and that contain a single copy of the T-DNA insert.

### Alfalfa Transformation

[0583] A regenerating clone of alfalfa (Medicago sativa) is transformed using the method of (McKersie et al., 1999 Plant Physiol 119: 839-847). Regeneration and transformation of alfalfa is genotype dependent and therefore a regenerating plant is required. Methods to obtain regenerating plants have been described. For example, these can be selected from the cultivar Rangelander (Agriculture Canada) or any other commercial alfalfa variety as described by Brown D C W and A Atanassov (1985. Plant Cell Tissue Organ Culture 4: 111-112). Alternatively, the RA3 variety (University of Wisconsin) has been selected for use in tissue culture (Walker et al., 1978 Am J Bot 65:654-659). Petiole explants are cocultivated with an overnight culture of Agrobacterium tumefaciens C58C1 pMP90 (McKersie et al., 1999 Plant Physiol 119: 839-847) or LBA4404 containing the expression vector. The explants are cocultivated for 3 d in the dark on SH induction medium containing 288 mg/L Pro, 53 mg/L thioproline, 4.35 g/L K2SO4, and 100 μm acetosyringinone. The explants are washed in half-strength Murashige-Skoog medium (Murashige and Skoog, 1962) and plated on the same SH induction medium without acetosyringinone but with a suitable selection agent and suitable antibiotic to inhibit Agrobacterium growth. After several weeks, somatic embryos are transferred to BOi2Y development medium containing no growth regulators, no antibiotics, and 50 g/L sucrose. Somatic embryos are subsequently germinated on half-strength Murashige-Skoog medium. Rooted seedlings were transplanted into pots and grown in a greenhouse. T1 seeds are produced from plants that exhibit tolerance to the selection agent and that contain a single copy of the T-DNA insert.

### Cotton Transformation

[0584] Cotton is transformed using Agrobacterium tumefaciens according to the method described in U.S. Pat. No. 5,159,135. Cotton seeds are surface sterilised in 3% sodium hypochlorite solution during 20 minutes and washed in distilled water with 500 μg/ml cefotaxime. The seeds are then transferred to SH-medium with 50 μg/ml benomyl for germination. Hypocotyls of 4 to 6 days old seedlings are removed, cut into 0.5 cm pieces and are placed on 0.8% agar. An Agrobacterium suspension (approx. 108 cells per ml, diluted from an overnight culture transformed with the gene of interest and suitable selection markers) is used for inoculation of the hypocotyl explants. After 3 days at room temperature and lighting, the tissues are transferred to a solid medium (1.6 g/l Gelrite) with Murashige and Skoog salts with B5 vitamins (Gamborg et al., Exp. Cell Res. 50:151-158 (1968)), 0.1 mg/l 2,4-D, 0.1 mg/l 6-furfurylaminopurine and 750 μg/ml MgCL2, and with 50 to 100 μg/ml cefotaxime and 400-500 μg/ml carbenicillin to kill residual bacteria. Individual cell lines are isolated after two to three months (with subcultures every four to six weeks) and are further cultivated on selective medium for tissue amplification (30° C., 16 hr photoperiod). Transformed tissues are subsequently further cultivated on non-selective medium during 2 to 3 months to give rise to somatic embryos. Healthy looking embryos of at least 4 mm length are transferred to tubes with SH medium in fine vermiculite, supplemented with 0.1 mg/l indole acetic acid, 6 furfurylaminopurine and gibberellic acid. The embryos are cultivated at 30° C. with a photoperiod of 16 hrs, and plantlets at the 2 to 3 leaf stage are transferred to pots with vermiculite and nutrients. The plants are hardened and subsequently moved to the greenhouse for further cultivation.

### Example 9

### Phenotypic Evaluation Procedure

### 10.1 Evaluation Setup

[0585] Approximately 35 independent T0 rice transformants were generated. The primary transformants were transferred from a tissue culture chamber to a greenhouse for growing and harvest of T1 seed. Six events, of which the T1 progeny segregated 3:1 for presence/absence of the transgene, were retained. For each of these events, approximately 10 T1 seedlings containing the transgene (hetero- and homo-zygotes) and approximately 10 T1 seedlings lacking the transgene (nullizygotes) were selected by monitoring visual marker expression. The transgenic plants and the corresponding nullizygotes were grown side-by-side at random positions. Greenhouse conditions were of shorts days (12 hours light), 28° C. in the light and 22° C. in the dark, and a relative humidity of 70%. Plants grown under non-stress conditions were watered at regular intervals to ensure that water and nutrients were not limiting and to satisfy plant needs to complete growth and development.

[0586] Four T1 events were further evaluated in the T2 generation following the same evaluation procedure as for the T1 generation but with more individuals per event. From the stage of sowing until the stage of maturity the plants were passed several times through a digital imaging cabinet. At each time point digital images (2048×1536 pixels, 16 million colours) were taken of each plant from at least 6 different angles.

### Drought Screen

[0587] Plants from T2 seeds are grown in potting soil under normal conditions until they approached the heading stage. They are then transferred to a “dry” section where irrigation is withheld. Humidity probes are inserted in randomly chosen pots to monitor the soil water content (SWC). When SWC goes below certain thresholds, the plants are automatically re-watered continuously until a normal level is reached again. The plants are then re-transferred again to normal conditions. The rest of the cultivation (plant maturation, seed harvest) is the same as for plants not grown under abiotic stress conditions. Growth and yield parameters are recorded as detailed for growth under normal conditions.

### Nitrogen Use Efficiency Screen

[0588] Rice plants from T2 seeds are grown in potting soil under normal conditions except for the nutrient solution. The pots are watered from transplantation to maturation with a specific nutrient solution containing reduced N nitrogen (N) content, usually between 7 to 8 times less. The rest of the cultivation (plant maturation, seed harvest) is the same as for plants not grown under abiotic stress. Growth and yield parameters are recorded as detailed for growth under normal conditions.

### Salt Stress Screen

[0589] Plants are grown on a substrate made of coco fibers and argex (3 to 1 ratio). A normal nutrient solution is used during the first two weeks after transplanting the plantlets in the greenhouse. After the first two weeks, 25 mM of salt (NaCl) is added to the nutrient solution, until the plants are harvested. Seed-related parameters are then measured.

### 10.2 Statistical Analysis: F Test

[0590] A two factor ANOVA (analysis of variants) was used as a statistical model for the overall evaluation of plant phenotypic characteristics. An F test was carried out on all the parameters measured of all the plants of all the events transformed with the gene of the present invention. The F test was carried out to check for an effect of the gene over all the transformation events and to verify for an overall effect of the gene, also known as a global gene effect. The threshold for significance for a true global gene effect was set at a 5% probability level for the F test. A significant F test value points to a gene effect, meaning that it is not only the mere presence or position of the gene that is causing the differences in phenotype.

[0591] Because two experiments with overlapping events were carried out, a combined analysis was performed. This is useful to check consistency of the effects over the two experiments, and if this is the case, to accumulate evidence from both experiments in order to increase confidence in the conclusion. The method used was a mixed-model approach that takes into account the multilevel structure of the data (i.e. experiment-event-segregants). P values were obtained by comparing likelihood ratio test to chi square distributions.

### 10.3 Parameters Measured

### Biomass-Related Parameter Measurement

[0592] From the stage of sowing until the stage of maturity the plants were passed several times through a digital imaging cabinet. At each time point digital images (2048×1536 pixels, 16 million colours) were taken of each plant from at least 6 different angles.

[0593] The plant aboveground area (or leafy biomass) was determined by counting the total number of pixels on the digital images from aboveground plant parts discriminated from the background. This value was averaged for the pictures taken on the same time point from the different angles and was converted to a physical surface value expressed in square mm by calibration. Experiments show that the aboveground plant area measured this way correlates with the biomass of plant parts above ground. The above ground area is the area measured at the time point at which the plant had reached its maximal leafy biomass. The early vigour is the plant (seedling) aboveground area three weeks post-germination. Increase in root biomass is expressed as an increase in total root biomass (measured as maximum biomass of roots observed during the lifespan of a plant); or as an increase in the root/shoot index (measured as the ratio between root mass and shoot mass in the period of active growth of root and shoot).

[0594] Early vigour was determined by counting the total number of pixels from aboveground plant parts discriminated from the background. This value was averaged for the pictures taken on the same time point from different angles and was converted to a physical surface value expressed in square mm by calibration. The results described below are for plants three weeks post-germination.

### Seed-Related Parameter Measurements

[0595] The mature primary panicles were harvested, counted, bagged, barcode-labelled and then dried for three days in an oven at 37° C. The panicles were then threshed and all the seeds were collected and counted. The filled husks were separated from the empty ones using an air-blowing device. The empty husks were discarded and the remaining fraction was counted again. The filled husks were weighed on an analytical balance. The number of filled seeds was determined by counting the number of filled husks that remained after the separation step. The total seed yield was measured by weighing all filled husks harvested from a plant. Total seed number per plant was measured by counting the number of husks harvested from a plant. Thousand Kernel Weight (TKW) is extrapolated from the number of filled seeds counted and their total weight. The Harvest Index (HI) in the present invention is defined as the ratio between the total seed yield and the above ground area (mm²), multiplied by a factor 10⁶. The total number of flowers per panicle as defined in the present invention is the ratio between the total number of seeds and the number of mature primary panicles. The seed fill rate as defined in the present invention is the proportion (expressed as a %) of the number of filled seeds over the total number of seeds (or florets).

### Examples 11

### Results of the Phenotypic Evaluation of the Transgenic Plants

[0596] 11.1. basic-Helix-Loop-Helix Group 9 (bHLH9)

[0597] The results of the evaluation under non-stress conditions of T1 transgenic rice plants expressing the longest Open Reading Frame ORF of the O. sativa_Os01g0900800 nucleic acid which encodes SEQ ID NO: 2 are presented below. An increase of at least 5% was observed for aboveground biomass (AreaMax), emergence vigour (early vigour) and number of total seeds (Table E1).

TABLE E1

| | % increase in transgenic plants |
|---|---|
| Yield related trait | relative to control plant |
| AreaMax | 20 |
| early vigour | 32 |
| number of total seeds | 17 |

### 11.2. Imbibition-Inducible 1 (IMB1)

[0598] The results of the evaluation of transgenic rice plants expressing an IMB1 nucleic acid under non-stress conditions are presented below. An increase of at least 5%(with a p-value≦0.05) was observed for total weight of seeds, number of filled seeds, flowers per panicle, harvest index and for total number of seeds. The overall increase for these parameters in the confirmation experiment is provided in Table E2. An increase was also observed for above-ground biomass and fill rate.

TABLE E2

| Parameter | Overall increase |
|---|---|
| totalwgseeds | 18.2 |
| nrfilledseed | 15.7 |
| flowerperpan | 11.2 |
| harvestindex | 13.9 |
| nrtotalseed | 11.7 |

### 10.3. PCD-Like

[0599] The results of the evaluation of transgenic rice plants in the T2 generation and expressing a nucleic acid comprising the longest ORF in SEQ ID NO: 358 under non-stress conditions are presented below. See previous Examples for details on the generations of the transgenic plants.

[0600] An increase of at least 5% was observed for the total seed yield (totalwgseeds), number of filled seeds (nrfilledseed), fill rate, number of seeds per plant (nrtotalseed), harvest index (harvestindex) (Table E3).

TABLE E3

| | % increased in transgenic |
|---|---|
| Parameter | plants relative to control plants |
| totalwgseeds | 14.6 |
| nrfilledseed | 13.1 |
| harvestindex | 9.8 |
| nrtotalseed | 10.6 |

### 10.4. Pseudo Response Regulator Type 2 (PRR2)

[0601] The results of the evaluation of T2 generation transgenic rice plants expressing the nucleic acid sequence encoding a PRR2 polypeptide as represented by SEQ ID NO: 452, under the control of a constitutive promoter, and grown under normal growth conditions, are presented below.

[0602] There was a significant increase in aboveground biomass, in early vigor, flowering time, root biomass, plant height, seed yield per plant, number of filled seeds, total number of seeds, number of primary panicles, number of flowers per panicles, harvest index (HI), and Thousand Kernel Weight (TKW).

TABLE E4
Results of the evaluation of T2 generation transgenic rice plants
expressing the nucleic acid sequence encoding a PRR2
polypeptide as represented by SEQ ID NO: 452,
under the control of a promoter for constitutive expression.

| | 0verall average % increase in |
|---|---|
| Trait | 4 events in the T2 generation |
| Plant aboveground biomass | 18% |
| Early vigor | 10% |
| Flowering time | −4% |
| Root biomass | 14% |
| Plant height | 9% |
| Total seed yield per plant | 38% |
| Number of filled seeds | 32% |
| Total number of seeds | 29% |
| Number of primary panicles | 11% |
| Number of flowers per | 19% |
| panicle | |
| Harvest index | 19% |
| Thousand kernel weight | 5% |

The application's sequence listing, which the Patent Office published only in electronic form, follows.

SEQUENCE LISTING (481 sequences)

SEQ ID NO: 1 - DNA, 1917 bp, Oryza sativa
tcacctcctccctacctctcgccattattaaatcctctcctctcctctcttctccacatccacaagaaatttcgtagcggaatcacgagccctcgtctcgatcgtagcttgagcttgagctgagttgctggtttggtgtgtggagagatcagtggggtgggtgggggtgggtgatgtacggcgcgccggtgtccaaggacctgagcctgcagccagccggggtgcggacgccgccgcagatgagctcgccgggcttgctgcggtacaggtcagcgccgagcacgctgctcggggaggtctgcggcgacttcgtcctccccggtggtggtggtggtggtgggcagctgcagctgcagctgcagcagcagcggcctgggagcccggaccacgccgcggacaccgtcctcgcgcgcttcctcgccggccatggcggccacgacaacaagcctccccgccccgccgcccacttcgccccaccggaagactccatggcctcgcatcagcagcagctcatgtaccagtcgcatcagcagcagcagcagatggcttccgccatggagggactctaccgcaccgtcagctccggcggcacggagtccaccgccgccgccgccggcaacagcctcctccggcagagcagctcccccgccggcttcctcaaccatcttaccatggacaacggatacgggaatatgctaagagcgggcatgggcggcggcggcggtggcggcgacccgcggctcaaggggcagctcagcttctcgtcgcggcaggggtcggtgatgtcccagatctcggagatgggcagcgaggacgaggagctcgccggcggcggcggcagcccggaggctggcagcaacggcggtggcgccgcacgcggcggctacggcggcgggtacgcgatggggtcctccgcctgggaggagccctcgccgccggcgacgtcgctcctcccggacagcagcctcccgtccaagcgcccccgcgacgacctgccgcggcagctcagcctcccggcggcgtccaagaacagcagcaagcccccctcctccgcctccgccgccgcgtcgccggagatggccgccatcgagaagttcctccagttccaggacgccgtcccctgcaagatccgcgccaagcgcggctgcgccacccacccccgcagcatcgccgagcgggtgaggaggacgcggatcagcgagcggatacggaagctgcaggagctcgtccccaacatggaaaagcaaaccaacactgctgacatgttggatcttgccgtggactacatcaaggagctccagaagcaggtcaaggtgttaaacgacagccgttccagctgcacctgctcggcgagcaagcagaagcacttcgccggctaaatcaatcaagtcaatcaatcgccatgaccggtgcagcagtgcgcaacacacgaacggccgcaaaaggcatgcagcagaagcatctgcaccggcagtttttctaagcttcgtttccttctttgctgatgaattcgctggtctatctggtaaattgaacatgagggcattggattttggagcagtggcatgcattcttcagagttcacaaagatgatgggttggggtcccacatggtagtggtagactactgtagctgcaaagcttgattaattaattagcctgttcttttgataatgaaggagaggagagtaactcacaagtgtatagatggttgtctcatctctgtttgtcatagtacacaccaagtgcaagttgcagctgtgtctgcttgcaagaatgcatgcccatgtacattgcatccccctttgcttgacaaatgacacatccagacagcctccatatcctgtttcctctcgttgctacaccctgtttttgtgaagtacatgcatcgcaacaatgttcacgaataatcctggtc

SEQ ID NO: 2 - protein, 387 aa, Oryza sativa
MNRMTAPHGGMPPPPMPAAGGLARYGSAPGSLLASIADSVIRGRGVGVVDQLHHHQHQHQLPPPPPPQQQQMVGRYFSAESSGLTSCESSCRTTTTTSTAAAADVGRHPLERAYGGSGEIHVDASSAAVPLFRHSSSPAGLLSRLMADPHGNGMAATRGMGGYSGGGGDAGAMAHRRLSSQWSFSRQDLPQISEMGGLIPDIGESIVTGGGGNSSSDGAGHGAQSSSFLSSRNFSMSSWDDTNSIMFSPPSSSKKARVAAAAAGDHGDDMVSSFSNIDSQFGLSKQSSLEMAGMDDFLQLQPDSVACRARAKRGCATHPRSIAERERRTRISKRLKKLQDLVPNMDKQTNTSDMLDIAVTYIKELQGQVEKLKHDQANCTCSGKHDC

SEQ ID NO: 3 - DNA, 1679 bp, Arabidopsis thaliana
ttcatcatcaccttcatctctctcttcctctcatcagacttcaccgttcttctttctctcttcttcatcttcagacgaaacctcctttacttccccttcaaggttttatatttcccaaatcctacacctgctcacatctcaagctcaagttttgttttcccgggaaaagtgacacaaacaagaacttaacaagggagaagaaaaagcttatattcatatcaacggttgacgttggaaagctattaagatttggttttctacaaatttgttcttcctgaaacgtcacgagacagagcttacaagaagagaaaacagaggaaatttcgttgcattttttttacatattgattcgattaatggattcaaataatcatctctacgacccgaatcccaccgggtcgggtcttcttcgttttagatcagctccgagctctgttctcgccgcttttgttgacgacgacaagattggtttcgactccgataggttgctttcaagattcgtgacctctaatggcgttaacggagatctgggttcacctaaattcgaggataagtctccggtttcgttaacgaacacctctgtttcatacgccgccactctgccgccaccgccgcagcttgagccgtcgagttttctgggtttgccgccgcattacccgaggcagagtaaagggataatgaactcggttggtttggatcagtttctcggtatcaataatcatcacaccaaaccagttgaatctaatcttctccgtcaaagcagctctccagccggaatgtttactaatctctctgaccaaaacggttatggttcaatgaggaatttgatgaattacgaagaagatgaagagagtccatctaattccaatggattaagacgccattgcagtctctcttcaaggccaccttcttcacttggaatgctttctcaaatacctgaaatcgcacccgaaactaattttccatatagccattggaatgatccatccagctttattgataacttatcctcacttaaaagagaagccgaggacgatggaaaattgtttctcggagctcagaacggagagtccgggaatcgtatgcagttactgtcgcatcatttgagcctaccaaagtcatcatcgacagcctcggacatggtttcagtggataagtatcttcagctacaagattctgttccttgtaaaatcagagccaaacgtggttgcgctacacatcctcgaagcatcgctgaacgggtaagaagaacgcggataagcgagcgaatgaggaagttacaagagcttgttcctaacatggacaagcaaaccaacacttcggatatgttggatttagctgtggattacatcaaagatttacaaagacagtataagattttaaacgacaacagagctaactgtaagtgtatgaacaaggagaagaagtcaatatagggcgcaacaaagtgtgtagtagataggactaaaaagcagggagaaggacaagaaagaaacaatgtcatgtctgaatattttttagccgaaacagaccaaattgtctatgtaagctctcgagaaaagcatctgcttccaacaaaattctaagtaataaaatagtactcgatttgttcttatttcattattacaatgcagaatctactaatcaaatgttgtactacaaaaggtaagatcaactac

SEQ ID NO: 4 - protein, 359 aa, Arabidopsis thaliana
MDSNNHLYDPNPTGSGLLRFRSAPSSVLAAFVDDDKIGFDSDRLLSRFVTSNGVNGDLGSPKFEDKSPVSLTNTSVSYAATLPPPPQLEPSSFLGLPPHYPRQSKGIMNSVGLDQFLGINNHHTKPVESNLLRQSSSPAGMFTNLSDQNGYGSMRNLMNYEEDEESPSNSNGLRRHCSLSSRPPSSLGMLSQIPEIAPETNFPYSHWNDPSSFIDNLSSLKREAEDDGKLFLGAQNGESGNRMQLLSHHLSLPKSSSTASDMVSVDKYLQLQDSVPCKIRAKRGCATHPRSIAERVRRTRISERMRKLQELVPNMDKQTNTSDMLDLAVDYIKDLQRQYKILNDNRANCKCMNKEKKSI

SEQ ID NO: 5 - DNA, 1625 bp, Arabidopsis thaliana
aagtttctctcacgttctcttttttaattttaatttctcgccggaaacaatctcatctcccggcgaacgaaacttccggtgtggtactgcaaacggagaaaaaaataaccaaagaagagagaaactcaaaagctactaagatggaatcagaattccagcaacatcacttccttctccacgatcatcaacaccagagaccaagaaactcaggattgattcgttaccaatcagcaccaagttcgtacttttcgagtttcggtgaatcaatcgaagagtttttagatcgacccacaagtcctgaaactgagcgaatcttatctggctttttacaaaccaccgacacaagcgacaacgttgatagtttccttcaccatacttttaacagtgatggaactgagaagaaacctccggaagttaaaacagaggacgaagatgctgaaattccggtgactgcgacggcgacggcgatggaggttgttgtttccggtgatggtgaaatctcagtgaatcctgaagtatcgattgggtatgtggcttcggtttcgaggaataagagaccaagagagaaagatgatcggactccggtgaataatctagctcgtcataatagttcaccggccggattattttcatccattgatgttgaaacagcttatgcagctgtaatgaaaagtatgggaggttttggaggaagtaatgtgatgagtacaagcaatactgaagcttcgtctcttactcctagaagcaagttacttcctcctacttctagagcgatgagtccgatctctgaggttgatgttaaacccggtttctcgtctagattgcctcctcggacgctttccggtgggtttaatcgttcttttgggaatgaagggtctgcttcttccaagcttacagctcttgctaggacccaatctggaggtctagatcaatacaaaaccaaggatgaggattcagcaagtagacgtcctcctttggcacatcacatgagtttgcccaagtctttatcagatattgaacagttactgtcagattctatcccatgtaagatcagagccaagcggggttgtgcaactcatcctcgaagcatagccgagagggtgagaagaaccaagatcagtgaaagaatgaggaagctgcaagaccttgttccaaacatggacacgcaaacaaacacagcagacatgttggatcttgcggttcaatacatcaaggacctgcaagaacaagtgaaggcgctcgaagagagtcgggcaagatgtagatgctctagtgcgtgaaactagaagtgggagtatgcgcgagtgctagccagggagggagttgtgcatagaagtatcggttcggcctttggagaaaagtcgaagatagcaaagtagagaagagatcatgaacaaagctaaatttggtggtggtggtgaaaagggtttttgtaaagttggaacctttttttggtagggaagaaagtagcaaggttgtgtaatggtccgaactccaatgctattgtatgttcttacatccaaaaaaaagaaaagcagaagagaagtgatgtacaatgagaagcttattttattgtaactcaagaataattcaggtaattagtttattttcttttgttagaaact

SEQ ID NO: 6 - protein, 379 aa, Arabidopsis thaliana
MESEFQQHHFLLHDHQHQRPRNSGLIRYQSAPSSYFSSFGESIEEFLDRPTSPETERILSGFLQTTDTSDNVDSFLHHTFNSDGTEKKPPEVKTEDEDAEIPVTATATAMEVVVSGDGEISVNPEVSIGYVASVSRNKRPREKDDRTPVNNLARHNSSPAGLFSSIDVETAYAAVMKSMGGFGGSNVMSTSNTEASSLTPRSKLLPPTSRAMSPISEVDVKPGFSSRLPPRTLSGGFNRSFGNEGSASSKLTALARTQSGGLDQYKTKDEDSASRRPPLAHHMSLPKSLSDIEQLLSDSIPCKIRAKRGCATHPRSIAERVRRTKISERMRKLQDLVPNMDTQTNTADMLDLAVQYIKDLQEQVKALEESRARCRCSSA

SEQ ID NO: 7 - DNA, 1125 bp, Arabidopsis thaliana
tgtattaattaaagaaaaaaataaaacagagcaagaaacaaaaaaaaaaatgtaaagaaagagaaaaaaagctttcgtagtgtctattgaaaccagagaaaagccaaaggggatgcaaccaacatccgtcggtagtagcggcggtggtgacgacggaggaggcagaggaggaggaggagggctaagtagaagtggactatctcggatccgttcagctccagcgacttggcttgaagctttacttgaggaagatgaagaagagtctttgaaacctaatcttggtctcaccgatttgcttaccgggaactcgaacgatttaccgacaagtcgcggctcgttcgagttcccgattcctgttgagcaagggttgtatcaacaaggtgggtttcaccgacagaatagtactccggcggattttcttagtggttctgatggatttatccaaagctttgggattcaggcgaattacgattacttatcggggaatatcgatgtttctccgggaagtaagcggtctagagaaatggaagcactcttctcttctcctgagtttacttctcaaatgaaaggagagcaaagcagcggtcaagttcctaccggagtatcaagcatgtcggatatgaacatggagaaccttatggaggactctgttgcttttagggttcgggctaaacgtggttgcgcaactcatccccgcagcattgccgagagggtacgaaggacgcggattagtgatcggataaggaagctacaagagcttgtacctaacatggacaagcaaaccaacactgcagacatgttagaagaagcagtagaatacgtgaaagttcttcaaaggcagatccaggagttaacagaagaacagaagaggtgcacatgcatacctaaggaagaacaataaggtttgctcctgatttgttttatatttgcttaacggcaatgatctgatcgaaaaattcgaaagatgatcttagcttgaatttagatggatgtcatgttgaaaagtatattatttgataaatggatgtaggtgtaatataaaatttttgtacaataatgaagaaagttaaaaagaattaatgaaaacatatattctttatgatattagtgaaatgactttgattt

SEQ ID NO: 8 - protein, 262 aa, Arabidopsis thaliana
MQPTSVGSSGGGDDGGGRGGGGGLSRSGLSRIRSAPATWLEALLEEDEEESLKPNLGLTDLLTGNSNDLPTSRGSFEFPIPVEQGLYQQGGFHRQNSTPADFLSGSDGFIQSFGIQANYDYLSGNIDVSPGSKRSREMEALFSSPEFTSQMKGEQSSGQVPTGVSSMSDMNMENLMEDSVAFRVRAKRGCATHPRSIAERVRRTRISDRIRKLQELVPNMDKQTNTADMLEEAVEYVKVLQRQIQELTEEQKRCTCIPKEEQ

SEQ ID NO: 9 - DNA, 1151 bp, Arabidopsis thaliana
ctgtttttgtatccgtgtaaattaatcacacggtagtttttgatgaaaagacaacaatcggagaacaatctggtctgctgctaaaatttaataaattgttttgtctaattgtctccacccataaaaaagcgcgaattcaattcaccgactaaagacattctccggtggagaccccgatgcaatccactcatataagcggcggaagtagcggtggtggtggtggaggaggaggagaggtgagtcgaagtggattatctcggatccgttcagctccagctacttggattgaaaccctactcgaagaagatgaagaagaaggtttaaaacctaacctttgtttaacagagctgcttactggtaataataactctggaggagtgataacgagtcgtgacgactcgttcgagttcctgagttctgttgagcaaggattgtataatcatcatcaaggtggtggctttcaccgtcagaatagttctccggctgattttcttagtgggtctggttctgggactgatgggtatttctctaattttggtattccggcgaattatgactatttgtcgaccaacgttgatatttctccgactaaacggtctagagatatggaaacacagttttcttctcagctgaaagaagagcaaatgagtggtgggatatcaggaatgatggatatgaacatggacaagatttttgaggattcagttccttgtagggttcgtgctaaacgtggttgtgctactcatcctcgtagcattgctgaacgggtgagaagaacgcgaataagtgatcggattaggaggctgcaagagcttgttcctaacatggataagcaaaccaacactgcagacatgttggaagaagctgtggagtatgtgaaggctcttcaaagccagatccaggaattgacagagcagcagaagagatgcaaatgcaaacctaaagaagaacaataatgtatcctttaggatttgatatatctgtattttatttttgtactatctaaaaatggtgatgatctgttcgaaaattcgaaacatgatcttatatattgaactagaaaaaatagatatatatgaattttagctgtaaaatttttgtacaataaggagaaaaagatttagaagagtcaataaaaagatgatgtttac

SEQ ID NO: 10 - protein, 259 aa, Arabidopsis thaliana
MQSTHISGGSSGGGGGGGGEVSRSGLSRIRSAPATWIETLLEEDEEEGLKPNLCLTELLTGNNNSGGVITSRDDSFEFLSSVEQGLYNHHQGGGFHRQNSSPADFLSGSGSGTDGYFSNFGIPANYDYLSTNVDISPTKRSRDMETQFSSQLKEEQMSGGISGMMDMNMDKIFEDSVPCRVRAKRGCATHPRSIAERVRRTRISDRIRRLQELVPNMDKQTNTADMLEEAVEYVKALQSQIQELTEQQKRCKCKPKEEQ

SEQ ID NO: 11 - DNA, 1425 bp, Arabidopsis thaliana
atcttttatttttcttttagaaaccaaacttttcagatttctctctctccatttggcgatagaagaagtcatgtaccaatcatcatcctccacgtcatcatcatcgcagagatcatcgcttcccggcggcggaggactgatccgttacggctcagctccgggatcgtttctaaactctgtggttgacgaagtcatcggaggaggctcatcaaacgctcgtgacttcaccggctatcaaccgtcgtcggataacttcatcggtaactttttcaccggagctgctgactcatcctcgctgagatccgattcgacgacttgtggagtcaacaactcatccgacggacagaaacagctaggcaataacaataataataatagtaataaagatatcttcctcgacagatcctacggtggattcaacgagatctcgcaacaacacaagagcaacgacatcggaggaggaaacagctcaggatcttactctctcgctagacaacgtagctctcccgccgatttcttcacctacctcgcctcagataaaaacaatttctcgttgaaccaaccaaccagtgattatagtccgcaaggagggtctaatgggggacgaggacattccagattgaagtctcagctaagcttcacgaatcacgactctctggctcggatcaacgaggtcaatgagaccccagtccacgacggttcaggccattcgttttctgcggctagctttggtgcagccactactgattcttgggatgacggttccggttcgatagggtttaccgtgactaggcccagtaaacgatccaaggacatggactctggtctcttttcgcagtatagtcttccttcagacacttcaatgaactacatggataacttcatgcagcttccagaagattctgtaccctgcaaaatccgggccaaacgcggctgcgccacccatcctagaagcatcgctgagcgggagaggagaacgagaataagtgggaagctaaagaagctacaagatcttgtccccaacatggataagcaaacaagctattcagacatgctggatttagctgtacaacacatcaaaggccttcagcatcaacttcagaatttgaaaaaagatcaagagaattgcacgtgtgggtgcagtgagaaaccaagctagctcaaacccaaaggtagggtcatcctaattttatttgcattgttccgattttatcatatgagagaattagagaagatgtaaataaaatagattatattaaatgtctaatcctcttataattaagctcctcattcgttatcattataagatagaacagtgacaattgtccattatgtttttgtttcaagtttatgttttgagtgtcgcctattttgtaaggattatgctatgaattctgaaactaattcgagttatgatcataagca

SEQ ID NO: 12 - protein, 362 aa, Arabidopsis thaliana
MYQSSSSTSSSSQRSSLPGGGGLIRYGSAPGSFLNSVVDEVIGGGSSNARDFTGYQPSSDNFIGNFFTGAADSSSLRSDSTTCGVNNSSDGQKQLGNNNNNNSNKDIFLDRSYGGFNEISQQHKSNDIGGGNSSGSYSLARQRSSPADFFTYLASDKNNFSLNQPTSDYSPQGGSNGGRGHSRLKSQLSFTNHDSLARINEVNETPVHDGSGHSFSAASFGAATTDSWDDGSGSIGFTVTRPSKRSKDMDSGLFSQYSLPSDTSMNYMDNFMQLPEDSVPCKIRAKRGCATHPRSIAERERRTRISGKLKKLQDLVPNMDKQTSYSDMLDLAVQHIKGLQHQLQNLKKDQENCTCGCSEKPS

SEQ ID NO: 13 - DNA, 937 bp, Arabidopsis thaliana
aagcatcagattagcttttgtagggtttttcttttccggtttcatgtaccctcctaattcctctaagtccaccgctcatgacggcggcggcgatgccgacaccaatcaatatgactcagccgctggagctacccgtgatttctcctctcttggccctcaaacccaccatcatccgccaccgcagcggcagcagcagcatcagcagaatcccaacctcgtcggccattatttaccgggcgagccatcttccatcggattcgattccaacgcttcttcttcgtcttctttgttccgacacagaagctctccggctggattctacgaccaacatcttcccactgatcccaacggaacaggtttttctctaggacggccaaacggaggctacggcggaggaggagagcaagggccgtcgaggttgaagtcggagctgagattctctagtgggagtagtagccatcaagaacataattctctaccgcgaatctcggaggttgaagcggctgcagcggctagaaacggtgtcgcatcaagtagtatgagttttggaaataatcgtactaacaattgggacaactcgtcttctcatatcagtttcaccattgatcaacccggaaaacggtccaagaactccgactttttcaccttagaaactcagtatagcatgccgcaaacaactctggaaatggcgacaatggagaacttgatgaacatcccagaggactcggtgccttgtagggctagagccaagcgcggcttcgcgactcacccacgcagcattgctgaaagggagagaagaacgaggataagcgggaagctgaagaagctacaagaacttgtgcctaatatggacaagcaaacgagctacgcagatatgttggatttggctgttgagcatatcaaaggtcttcagcaccaagtagaggtgcgtccttag

SEQ ID NO: 14 - protein, 297 aa, Arabidopsis thaliana
MYPPNSSKSTAHDGGGDADTNQYDSAAGATRDFSSLGPQTHHHPPPQRQQQHQQNPNLVGHYLPGEPSSIGFDSNASSSSSLFRHRSSPAGFYDQHLPTDPNGTGFSLGRPNGGYGGGGEQGPSRLKSELRFSSGSSSHQEHNSLPRISEVEAAAAARNGVASSSMSFGNNRTNNWDNSSSHISFTIDQPGKRSKNSDFFTLETQYSMPQTTLEMATMENLMNIPEDSVPCRARAKRGFATHPRSIAERERRTRISGKLKKLQELVPNMDKQTSYADMLDLAVEHIKGLQHQVEVRP

SEQ ID NO: 15 - DNA, 1242 bp, Aquilegia formosa
gagttattgatgagcatgaaagtgaacagatattgtttaacactccaccaccactaccacaaccacctaaacaacaagcacctatgtccaatcatgcttcaaatgttgctgagaatgtttatagggttgcgagttcgatgggtttggatcatcaatcatcacaaatgaagatggggaattctaatcttattagacacagtagttctccggcagggctctttgccaatttaaacgttgaaaacggttatgctgtaatgcggggcataggaaatttcggagctggaaatagtactaatgaagctgcatcaactaggaggttgaagaatcagatgaactacccatccgggccaccttcttcttcagggttaatgtctcctatctctgaagttggaagtgaaagcattggaacatgtgctggagatggtggaagtgtgggcaacagcaatgttagcaatcaataccctcccaacttccctctcaactcttgggaagactctgcactggagaatttcacaagccttaaaagattcagagatgcggacacaaagatgcattctggtttaaactcgtcagagcctgagaatccagaggctggaaatcaaactcgcaatttgacccaccattttagtttgccaaaaacgtcagtggagatggctgccatccttcaattccaggattctgttccttgtaaaattcgagcaaagcggggttgtgctactcacccacgaagtatcgcggagagggttagacgaactcgaatcagtgaaagaatgagaaagctacaagaacttgttccaaacatggacaagcaaacaaacaccgcagacatgttagatttggctgtggagtacattaaagagctccaaaaacaggtcaagaaacttaatgataatcgagcgacttgtacgtgttccagtaagcagaaaccatactaaaatcctagaggttgatatgtttctgtacagaaaaataaggaagaaaaaggatggaataaagagaaagtgagagcaaagctgacttctctagcttttagttagaagaatgtaagtaggggttactgatgtgggtatggagatgattaaaatccaaaaccctataggcaatcagaggttttctcctagtataaaaatgttgtatagcaaatcttccaaatgtacttccttgttgtatgtaatttatttgtttagttagtacatagactcaacaagcttgttgatatcctcttctttattctgataatta

SEQ ID NO: 16 - protein, 283 aa, Aquilegia formosa
MSNHASNVAENVYRVASSMGLDHQSSQMKMGNSNLIRHSSSPAGLFANLNVENGYAVMRGIGNFGAGNSTNEAASTRRLKNQMNYPSGPPSSSGLMSPISEVGSESIGTCAGDGGSVGNSNVSNQYPPNFPLNSWEDSALENFTSLKRFRDADTKMHSGLNSSEPENPEAGNQTRNLTHHFSLPKTSVEMAAILQFQDSVPCKIRAKRGCATHPRSIAERVRRTRISERMRKLQELVPNMDKQTNTADMLDLAVEYIKELQKQVKKLNDNRATCTCSSKQKPY

SEQ ID NO: 17 - DNA, 1329 bp, Aquilegia formosa
taaagcattatacatttataaagaatagagactgactaaattataatcacaagagaagataatacccgttcttgagaagacacctgagacctaaatctcactgatctgacctagcagtagtacactaaacagtgagtctgcacttttttatatcttcttccacttattccctacctaggcatttgcaattcttttggtgctcagtgagttcctgccaagtttgggattttagatgtactaaaatgctgctctggttgcatcaaaacaactatatctattaagatgacattcttttacattttcgggtttctctaattcagtacctgtatttgattctgtaagaatttgacatattcaactgcttcttccaacatgtctgcagtattagtttgcttatccatattaggtacaagttcctgaagttttcttatgcgatcactgattcgtgtccttcgaaccttactactagtcgtcctgatattgcttatagtgttggcatgtgtactcactttcaatccaatcccaaggaatctcactactctgatgttaaacgggttatccgatatgtcaatagcacggctaatcatggtctctggtatactcgtgatactaatagtgttgtcgcaggatactgtgatgccgattatggcagtgacttatctgatcgtcacagtaccagtggtgggtgcttttatctggggaataatttgatttcttggaacaataagaaacagtccactgttgccatgtccagtgctgaggcagaatatattgctgcggctggttgttgtactcaattgttgtggatgaaacagatgctatctgactatggtctttcccaaaacctcataactctgtttctctctgcaatgctccggggatgggttgcacagccacgctttgcacgaacgcgacaaggaacagaatcctggaaaagcttctccatatccatatcagaaaaactatcactgtgctcctttttcaattgggattcgtgtgaagaatctgactctctttctaatttaccagtagtggggatgtcaagaaatgaaagtatatcatagttggaagctaccccatcatcagaagcaagatttggagaaggtgaagtgagattggcaagaagttcaggtggtgaactgttgtttctggtgaaggtgctagaagtatcaaataagttagtggggtcataaatattggagtttctaaggttgggtgcttgagaaacacattgggtttgtggtaattgtaaaggaagaacttcatcatcttcttgaagtaagctatcaaaccatgatactggagctgatttaaaccttgcaagtccac

SEQ ID NO: 18 - protein, 91 aa, Aquilegia formosa
MISRAIDISDNPFNIRVVRFLGIGLKVSTHANTISNIRTTSSKVRRTRISDRIRKLQELVPNMDKQTNTADMLEEAVEYVKFLQNQIQVLN

SEQ ID NO: 19 - DNA, 685 bp, Brassica napus
acgaattttgttttattggttaaatttgattgatcgaactaatttaagttgtcactatggtgacgacttcgagaatgtgtcaaaaccagacttcattaatagaccaccatcactttctttggacctccaaaatcacaagtatataattaaaatctttttgttgctgttgaattgattccttaagtctccttttcttctcttctatacttcatgtttggaaacacatcatatcatttcatcatcgcttcttgcatgccccacaagtgcatctctccatccccttctccagcgactctacttggtgttgaagacctttgatatgctcaacagccaaatccaacatgtctgcatagctcgtttgtttgtccatattgggcaccagttcttgtagcttcttcagcttcccgcttattctcgttcttctctccctttcagcgatactacgcgggtgagtcgcacatccacgcttggccctaaccctacagggcaccgaaccctctgggatgttcatcagactctccattcttgccatttccagagacgtttgtggcatgctaaactgagtttctaaggtgaaaaagtcggtggtcttggaccgttttccaggttcatcaatggtgaaactgatttgagaagacgacctgtcccaaatgttactatcatttccaaaactcatactcgtcga

SEQ ID NO: 20 - protein, 145 aa, Brassica napus
MSFGNDSNIWDRSSSQISFTIDEPGKRSKTTDFFTLETQFSMPQTSLEMARMESLMNIPEGSVPCRVRAKRGCATHPRSIAERERRTRISGKLKKLQELVPNMDKQTSYADMLDLAVEHIKGLQHQVESLEKGMERCTCGACKKR

SEQ ID NO: 21 - DNA, 584 bp, Brassica oleracea
cccacgcgtccgttctcagatgaaagaagagcaaatgagtggtggtgtatcaggaatgatggatatcaacatggataagctacttgaggactcggttccttgtagggttcgtgctaaacgcggttgtgcaactcatcctcgtagcattgctgaacgggtgaggagaacgcgaataagtgatcggatcaggaggctgcaagaacttgttcctaacatggataagcaaaccaacactgcagacatgttagaagaagctgtggagtatgtgaaagctcttcaaagcaagatccaggagttgacagagcagcagaggaggtgcatatgcaaacctaaggaagaacaataaggtttcctataggattgatatatatatatatcaataagtattttttttttttgaatctacttgtgctgatgatcggttcgaaaatttgaaacatgatcctatacggaactagaaaaaatagattatttactactgtctgtcaaaaacacatccgagaaccttctctctaccaaagtttctaaatcaaagaatctcgtcggtgaccggtggtcttgccgccggttaccatcttttttct

SEQ ID NO: 22 - protein, 108 aa, Brassica oleracea
MKEEQMSGGVSGMMDINMDKLLEDSVPCRVRAKRGCATHPRSIAERVRRTRISDRIRRLQELVPNMDKQTNTADMLEEAVEYVKALQSKIQELTEQQRRCICKPKEEQ

SEQ ID NO: 23 - DNA, 1410 bp, Brassica oleracea
tccgctctctctctctctctctctcggacactcctcctcctcctccggctcaatttggcgatagaacaagtcatgtaccaatcatcttcccccacgtcatcatcgtcacaaagatcatcgctccccagcggtggcgcaggactgatccgatacggttcagctcctggatcgctcctgaactctatggtggatgaagtcattggagggtcaaacggtcgagacttcaactttccaccgccggataacttcctcggtgatttcttcgccggagctgattcttcctcgctgagatccgagtccatgacttgcggagtcaactcatccgacggccaaaaacatcttggcagcaacaacaacaataataataataataataaagatttgctcctggacagatcctacggtggattcaacgagatctcacagcacaagatcaacaaccacgttggaggaggaggaagtagctctggatcttactctctagctagacaacgtagctctcctgctgacttcttcagctacctctccggtgaaaaaaacaacttctcgttgaaccaaccaaccagtgattataatcagcaaggagggtctaacgcaggacgtggaccatcgagactcaagtctcagctaagcttcactagtcacgacccactgtctcgtatctctgaggtcaatgagacatctgtccacgatggttcaggccattcgttttccgcggctagcttcggtgccgccactgattcttgggatgacggttccggttcaatagggtttactgtgacccgacccactaaacgacccaaggacatgaactcaggtctcttttcacagtatagtcttccttcagacacttcaatgaactacatggataactacatgcagcttcccgaagattctgtaccatgcaaagttcgggccaaacgtggcttcgccacccacccgagaagcatcgccgagcgggagaggagaacgagaattagtgggagactaaagaagctacaagatcttgtccccaacatggataagcaaacaagctattctgacatgctggatttagcggtacaacatatcaaaggccttcaacaccaacttcagactttgaagaaagaacaagagaattgcacgtgcgaatgcagtgagagaccaaactagcctagctacgcaaccctaacggtagggatgcagtgagagaggtagctgcaaccctaacggtagggatcattccaaatttatcatatgctgtttgataatgtaagagaattagagaagatgtaaataaatacattatcaattgcctaattctctcttataagcttccctcatcgaaacagtgccaattgtccattacatttttttcaagtcttatgttctctgaatatttggaataattcgaattatgaatttacaatt

SEQ ID NO: 24 - protein, 359 aa, Brassica oleracea
MYQSSSPTSSSSQRSSLPSGGAGLIRYGSAPGSLLNSMVDEVIGGSNGRDFNFPPPDNFLGDFFAGADSSSLRSESMTCGVNSSDGQKHLGSNNNNNNNNNKDLLLDRSYGGFNEISQHKINNHVGGGGSSSGSYSLARQRSSPADFFSYLSGEKNNFSLNQPTSDYNQQGGSNAGRGPSRLKSQLSFTSHDPLSRISEVNETSVHDGSGHSFSAASFGAATDSWDDGSGSIGFTVTRPTKRPKDMNSGLFSQYSLPSDTSMNYMDNYMQLPEDSVPCKVRAKRGFATHPRSIAERERRTRISGRLKKLQDLVPNMDKQTSYSDMLDLAVQHIKGLQHQLQTLKKEQENCTCECSERPN

SEQ ID NO: 25 - DNA, 1182 bp, Citrus clementina
tttgaatctctctcatttttttcttcttaagaagtaacatagaagaagaacaataatgtatcatcatccatcatcatcctcttcttcacaacaaaatccaatgggccccactactgctgctggtgctggtggcagtggtgggctgactcggtacgtctcagctccaggctctcttttgaggacagccgttgattccatcatcggatcatcatcaccatcaccatcaccatcacaaccttccatcgtctcctcctctcacagccaccaacaccaccattacttcgccggtggctctacaaccacagctggcggtgactcttctcctgtatcttcgtttaccaccactgagtcaacttgcaaagtcaactcatccaacgctccaggtaataacaccaaatctggcttgcagagatcctacggcctcaatgagattcctcaaacacatactgcctcctcctccttgctcagacagcgtagttctcccgccggctttcttagtcatttcgcctccgaaaacgtaggtttttcagttacaagggaaaccggaaactataactcacaaggcagatctagtggtggcctcggagtgtcaaggttaaagtctcaattaagtttcacaggacaagattctctttcccagatctctgaagaaagtgagaatggtattgatggagttagttctggtagtggccggcaaaatgccacacattcttattcgactgctagttttgggatggactcttgggagaatggaacttccattgtgttttctgcaccaccaagtaaaagaactaaaaccttggatggagacatttttaattgtctcaatgctttggactctcagtttacaatgccgcaaacatctcttgaaatggctacagtggataatttattaaatatccctgaagactctgtcccttgcaaaattcgtgctaaacgtggctgtgctactcatccccgaacatccctgaaagggagaaaaaaccaaaattaacaaggaaattgaaaaaattaacagactttgttcaaaacatggaaagccaaacaattaattctaaatttttaaactttggaatgcaacatataaaagcccttcaaaacaaatggaaaaatccccacaaaaatctttaaaaattgcacggtgggaaagcaagcccaacccttttgattttttgcttttat

SEQ ID NO: 26 - protein, 261 aa, Citrus clementina
MQPTAGGSSSSSGGGGGGVGGRGELSRGGLARLRSAPASWIDALLEEELEDPLKPNQCLTQLLSSGNPVSVTAGLSLSQSQLDQVGFQRQNSSPADLFDGYFSNYATPSSYDYVDVSPNSNKRAREDNNTQFPSPTAKLNFHSHLKVEQSGQVPGGVSNLVDMDMEKLLEDSVPCRVRAKRGCATHPRSIAERVRRTRISDRIRKLQDLVPNMDKQTNTADMLEEAVEYVKFLQKQIEELTEHQRRCKCSAKDKSEKLPNL

SEQ ID NO: 27 - DNA, 776 bp, Cichorium intybus
tgagttgcttaaccacaggaaatcatctatacccacagaggaatagattagagatgcaaccgacaggcagcggcggaggactgtccaggttccggtcagctccggcgacatggctggaagcactgctagaatcagaagaagaagatgtaatcattgacccaccaaaaccatccttaactacgactcaaccttctatttcagccacttcctccagacctacgtacgctgatcctaatatcttcttacctagccccgttagtctccgacagaacagctctccggcggaatttctttctcagatcaacaatcctgatgcctacctctccaactactcgacggcgaattacgacgactacctctccccttcctttcacggcgttaaatcatccagagatgtggctttagacgaccaacaagtcaagttcaccacgcagctgagcggagatcagagcgcgttgttggatgttgagatggataagcttctgggggattctgtgccgtgtcgagtacgagcaaagcgcggctgtgccactcatcctcggagtatcgccgagagggtaagaaggactcggattagtgacagaatcaggaagctccaagaactggttccgaatatggataagcaaacaaacacagccgacatgctagaagaggcagttgagtacgtcaagtttctacaaagacagattcaggaacttagggagcaccgagacaaatgcagatgtgtggttaacgattgatctcagcaaagaagctaccaattttcaagggattga

SEQ ID NO: 28 - protein, 228 aa, Cichorium intybus
MQPTGSGGGLSRFRSAPATWLEALLESEEEDVIIDPPKPSLTTTQPSISATSSRPTYADPNIFLPSPVSLRQNSSPAEFLSQINNPDAYLSNYSTANYDDYLSPSFHGVKSSRDVALDDQQVKFTTQLSGDQSALLDVEMDKLLGDSVPCRVRAKRGCATHPRSIAERVRRTRISDRIRKLQELVPNMDKQTNTADMLEEAVEYVKFLQRQIQELREHRDKCRCVVND

SEQ ID NO: 29 - DNA, 630 bp, Chamaecyparis obtusa
gggatgatgcaacaaggcattctggaaaacattctagcttgcaaaatggtacaaactatgctgcaagaaagcgttcaaaagaaatggatgggaaagtgatgatgcaagatctgcataacccagatgcccagaaggtagagacaggaagtcagggcacatctacattagtcaatccatcacacaatttgtcaaggtccatatctgcagaacttgcattggaagagctcatgcaagactctgttccctgcaaagttcgtgcaaagcggggatttgcaacacacccacgaagcattgccgagagagtgcgaagaacacgaatcagtgaacgaatgaggaaattgcaggagcttgtgccaaacagtgacaagcaaactacaaatattgctgacatgttagatgaggctgttgaatatgtgaaagcccttcagaaacaggttcaggagttcaaggaaaagcaagccaactgcacatgcatacacgtaccagattgtaaattcaaaagataacctttttgtgaacatgcatttttaggctttcaaagcctagttgcaatattgttattaatattccttttggaatatggcatttccccttggagggtgttaatatttgtgatgccaaacaatactg

SEQ ID NO: 30 - protein, 140 aa, Chamaecyparis obtusa
MDGKVMMQDLHNPDAQKVETGSQGTSTLVNPSHNLSRSISAELALEELMQDSVPCKVRAKRGFATHPRSIAERVRRTRISERMRKLQELVPNSDKQTTNIADMLDEAVEYVKALQKQVQEFKEKQANCTCIHVPDCKFKR

SEQ ID NO: 31 - DNA, 973 bp, Citrus sinensis
agcacatcggctagtaggctaatcaatcgtgttaacttgtcacctgggtcatcttcaagatttatgcctcagattgctgaaactgggaaccaaagcatggggaatagtagcccagagaaaaactttgtgggcaataatggtgccagtagacaatacatgcccaattttccaagcgatccttgggatgatgcttcattcagtggtgttaagagggctagagacagtacttgcaacatgtcttttggtctagacgcatatgaaactcagaatggaaattctggaaaccaatctactcgcttggtccaccatttgagcttaccaaaaacatctgctgaaatggctgctgtggagaagtttttgcattttcaaggttctgttccttgcaagattcgagccaagagaggttgtgccactcatccaagaagcattgccgagagggttagaagaactcggataagtgaacgaatgaggaaattgcaagaccttttcccaaacatggacaagcaaacaaacacagctgaaatgttagatctggcagttgaacacattaaagatcttcagaaacaagtcaagttactcacggacaataaggcaaaatgcatgtgcccaaacaaacaaaagctatgttgaattacaaaaacttccggtagacttgtatctgtacagatagcttaaggaagctgctacttgtgagatgaaaaagaaagatgactcctcatttccactgcccttaaaaaataataggatagcgagtgagatttagcgggttgaaaagattgctgttgtaatttattgtaagatccagttgagtagagtgattgtcttgctttgattctcttcacgtagattaattgtattaagcttcttcatccatgatttcttcaatacaaagtacaatcttttagctgttggccgaaagtttgaaaagaaattgtatgagttgggatgctgaaagaaattggaaggcgagcta

SEQ ID NO: 32 - protein, 253 aa, Citrus sinensis
MQPTAGGSSSSSGGGGGGVGGRGELSRGGLARLRSAPASWIDALLEEELEDPLKPNQCLTQLLSSGDPVSVTAGLSLSQSQLDQVGFQRQNSSPADLFDGYFSNYATPSSYDYVDVSPNSNKRAREDNNTQFPSPTAKLNFHSHLKVEQSGQVPGGVSNLVDMDMEKLLEDSVPCRVRAKRGCATHPRSIAERVRRTRISDRIRKLHDLVPNMDKQTNTADMLEEAVEYVKFLQKQIEELTEHQRRCKCSAKD

SEQ ID NO: 33 - DNA, 1298 bp, Citrus sinensis
ggctggtcttgtttccacttaccagagaaagatagagtataaaataaattataaaaaaaaaaaaaatagaggtagaggtagagggttcatttcatttcatattcatttgtttattctctatctaaatttcaaaaaaaaaaaaaaaattagagaaaaggaagtgtaaactaaaagctagcaaatcagtggcgataaaacagatgcaaccgacagctggtggtagcagtagctcaagcggcggaggtggaggtggagttggcggtcgtggagaactgagccgaggaggactcgctcggctccggtcagctccagcttcgtggatagatgcacttttagaagaagaattagaggacccattgaagccaaaccagtgcctgactcagctacttagtagcggcgatcctgttagtgttactgctgggctgagcttgagtcagagtcagctggaccaagttggtttccagcggcagaacagctcccctgccgatttatttgatgggtacttttcaaactatgcaactccatcgagttacgattatgtcgatgtttctcctaattccaataagagagctagggaagacaacaatacacaatttccatctccaactgcaaaactgaactttcactctcacttgaaagtggagcaaagtggacaggtacctggtggtgtttcaaatttggtagatatggatatggagaaactgttggaggattcagtgccttgtagggttcgtgcaaagcgtggttgtgccactcatcctcgaagtattgctgagagggttcgtaggacgcggatcagtgaccgtattaggaagcttcacgatcttgtgccgaacatggacaagcaaacaaacaccgctgatatgttagaggaggcagtagaatatgtcaagtttcttcaaaagcaaattgaggaactcacagagcatcagaggagatgcaaatgctcggcaaaagattaatctgagaagttaccaaatttgtaactatatatacaaggttaaagtccatcatggtttgtttggcgataatatcctatgattcctaccctccaagagatcagcctcgcaacaacaggtggcacaatctttatcactaactattcctctatatttggaagattgccagtcatatggaactatagccatggcgttcatgatcaggactttttcattttggcaaagaactgaacttcatgctctctgaagttcagttggtatggctgtaaaagtgctgtacacgataatttattatcagtctcgttagcaagcttcttttttatgaattattttttcaat

SEQ ID NO: 34 - protein, 188 aa, Citrus sinensis
MPQIAETGNQSMGNSSPEKNFVGNNGASRQYMPNFPSDPWDDASFSGVKRARDSTCNMSFGLDAYETQNGNSGNQSTRLVHHLSLPKTSAEMAAVEKFLHFQGSVPCKIRAKRGCATHPRSIAERVRRTRISERMRKLQDLFPNMDKQTNTAEMLDLAVEHIKDLQKQVKLLTDNKAKCMCPNKQKLC

SEQ ID NO: 35 - DNA, 750 bp, Centaurea solstitialis
gcgggggaattattattcacatttagaccgatgaattcgacaagcacgaatctgattcgacagagtagctctccggctggatttttgtcctccttgaacgctgaaaccggcatgagagatgcaaaccaagtcatttcgtcaaacgggttaaatagtaatcatatcggtttctcatcggcaccatcgtcttctcctatgtacttgccccaaattgccgaaaacaggaatgagatgaacgattccacattcagaagcttgaaaaggatgacagatggcgattcaaacatgttccatacctcgataaagatggacacacagcataatggaccatctggacattatacaccaagtttacttcaccatatgagcttgccgaacacctcttcggaaatggcggttgcagaaaagttcttgcgatttgagcaagactcgattccttgcaagacacgtgcaaaaagaggatttgccacacacccgcgaaacattgcggagagggttagaagaaccagaataagtgatagaatgaaaaagctaccagagcttttccctaccatggacaagcgaacaagcacagcagacatgttagatatggctgttcaatacattacagatctccaaaagaatatgcaggctctcaacgatgctcgagcacggtgcacgtgttcaagctaactattacaaatgggctcgcccacataaccaaagcctttgcatcatagaacacgaaacaggtccatgggccattgtgta

SEQ ID NO: 36 - protein, 213 aa, Centaurea solstitialis
MNSTSTNLIRQSSSPAGFLSSLNAETGMRDANQVISSNGLNSNHIGFSSAPSSSPMYLPQIAENRNEMNDSTFRSLKRMTDGDSNMFHTSIKMDTQHNGPSGHYTPSLLHHMSLPNTSSEMAVAEKFLRFEQDSIPCKTRAKRGFATHPRNIAERVRRTRISDRMKKLPELFPTMDKRTSTADMLDMAVQYITDLQKNMQALNDARARCTCSS

SEQ ID NO: 37 - DNA, 1361 bp, Carthamus tinctorius
cctccatatcaaaaaaagaaaaaagaaagataaacactttgacgtacaaaaaaggtcgttttacatgaaaaaagagaggcaaaggcatattggtttctgagaggacgtgagtttggcatgtaaaacgtagtactacaaacctacctaatcccccttattcactacaaagccaccttttccattcacacaacctttttttcttcatattcacaaatgaatcaagaattcagcttgctccagagacaacaagcaagaaccaaatggcaacaagaccatgagtttttcaatggtgatgatgatcaccaccaccttcaaaatatgttcgctccgttttcgggtttgatcgataaccagccgacgagcttagacgcggttaagccggaccccgggatgcacgaagggtggccggatttctcgtatggggatcaattgggttatgggtatatgaatcagacatttctaaatgggaattcaggttcagtttcagtgtcacctaagaagaggaaaactgataagggtggtaaaagcctagagctagtttctgaaaaggagaagaggataaaagggtgtgctgaagaaggagattctaagatcacacatcaatataacaataataataataatagcaattgtgacaataagagcagtaataacagcaaagaagcttctactacaaacacttcatctaaggagaaatcgaaggtctccgaggttcaaaaacccgattatattcatgttcgagctcgccgtggccaagccaccgacagccatagtttagccgaaagggtaagaagggagaagatcagtgagaggatgaaatacctgcaggatttggtaccagggtgcaataaaatcacaggaaaagctggaatgcttgatgaaatcatcaactatgttcaatcccttcaaaaacaagtagagtttctgtccatgaagcttgctactgttaacccggagctagacttcaacatcgataatgtgttcatgaaagagatgttccagtcctcgacaagcgaatttccagcactagggtgttctccggaagcagctaattctgcatattttcaattaagttcattagagcaagcggtttcatgctgtggattagacatgggaatgaactcgaccgaaatggcattaagaagaagtattagtgttccaacttcggtccctggaacatttatggattcatcctgtttcaatcaaatccagccaactgctacctgggatgctgatttacagaatctgtacaaaatggaatttgaacaaggaacattgataccatttcaatcccatcaatttacaggttcaaatgaaggaagcaatctgaagatggagatgtgatcagtagaaggaatttt

SEQ ID NO: 38 - protein, 215 aa, Carthamus tinctorius
MQPPGGAGGLSRFQSAPATWLETLLESEEEEEQDVIIDPPKPTIGGIYLDPNLLLPIPPAAAVVGRRQNSSPAEFLSETNNLHGHGYLSNFDDYLSSSFHGGAKPPTDPKFTTQLSGDQSALLDVDMDKLLEDSVPCRVRAKRGCATHPRSIAERVRRTRISDRIRKLQELVPNMDKQSNTADMLEEAVDYVKFLQHQIQELRAHRDKCTCSVND

SEQ ID NO: 39 - DNA, 1276 bp, Euphorbia esula
  misc_feature (1244)..(1246): n is a, c, g, or t
attttttcagaatcaattgaaacctccattaccggatcagaattcagttccgggaggaatggattaccggatgggaaattcacgggccggagcaggaaccggacggctttccggcgcaaaaaatgggggaaatagctcgaatcttttacggcataatagctcccccgctggacttttctccaatatcactgttgaaatggaaaacggctacgctgtaatgagaggtatgggagattatgtgacacccaaaagagaagcatcttattctccttctccggcaacaagtaggcccccgccggcagccacctcaggcgggagaatgagtccaattacggaaattgggaacaccaataacaacaacattggagaaaataataattcagacagtaattgtgtttatgatgagagtagaaataatgattatgtgacaggttttccaatgggatcatgggatcatgataatgcatcatcatcctctgtcatgtctcatggtttaactgatgatgatcgtacactttctggtggcttaattagttcagaaactcagaatcgagattcggggattccagcacctccgagattgtcacatcacttgagtttaccaaaaacaacagctgaaatgtcagccatagaaaagtttctccaacttcaagattccgtcccttgcaagattcgagctaaacgtggatttgctactcatcctaggagcattgctgagagggtaagaagaactcgaattagtgaaagaatgaggaagcttcaagacttggtaccaaacatggataagcaaacaaacacatcagacatgttggatttggctgttgactacattaaagaccttcaaagacaagtcaagacactttccgacagtcgtgcaaattgtacctgcaatgcaagtcaacaaccgctctaggtttacacaagtatggcttgattagagatgtatatacattattattaataagaacccctagatagcaggtgtaaaacgccatcgtttggggtatcacgagagggcgagaaaagggtaaagttctactagaacctaaccgcaagaattggacacatttatcaaaatagaatagttgtgtacattagcaaagtcaagatcataaatttgaggggcaactgcaacacttgtaatctcatttgggacagagtatctcgtgaaaccacccctttaaaagggtggattccggtgaccggagataaaaacgatttcaaagcacccgtctctctgtcannnggatgtatatagttcaagtttgatgtactc

SEQ ID NO: 40 - protein, 284 aa, Euphorbia esula
MDYRMGNSRAGAGTGRLSGAKNGGNSSNLLRHNSSPAGLFSNITVEMENGYAVMRGMGDYVTPKREASYSPSPATSRPPPAATSGGRMSPITEIGNTNNNNIGENNNSDSNCVYDESRNNDYVTGFPMGSWDHDNASSSSVMSHGLTDDDRTLSGGLISSETQNRDSGIPAPPRLSHHLSLPKTTAEMSAIEKFLQLQDSVPCKIRAKRGFATHPRSIAERVRRTRISERMRKLQDLVPNMDKQTNTSDMLDLAVDYIKDLQRQVKTLSDSRANCTCNASQQPL

SEQ ID NO: 41 - DNA, 1402 bp, Gossypium hirsutum
ttctcctttaacttatataatttcccttcctagttctcccatttctccacgctaccaaagccatgtatccatcatcttcgtctcaaaagcccatgggtcaatccgggctcacccgttacggttctgctcccggctcctttctggccaacgccgttgattccgtcatcggagcggaccctaacctcgtcggccactacttctccgccgctgactcctcctctttaacttcagagtcaacttgtaaagtcagctcatccaacgatccgcgagagcctaaatcagctgctgctgctgctcctgcccctcctcatcctcctccgcatcatccccatggatcttaccctgcaccttcttcttcctctctgctcagacaacgcagctcccccgccggtttccttagtcacctcacatcggaaaacggtttttctgttacaatgggcaacagaaattatagctctcaaggcagtggtaatggtggccatggagtgtcaaggttgaagtcccagttgagtttcactaggcaagattctctttctcagatctctgaagtgagtgagaatcttgtggatggtgttagctctaacagtaaccaccaaaatcctgcacattcgtttgctgctgctggctttggaatggattcatgggataatacaaactccattgtgttttctgccccatcaagcaagagagctaaaaatcttgatggcgatatttataactgtttcaatgccttggaaactcagtttagcttgccccaaacgacactcgagatggccacagttgaaaagctgctacatattcctgaagattccgtgccctgcaaaatccgagccaaacgtggttgtgccactcaccctcgaagcattgctgaaagagagagaagaacaagaataagtgggaagctgaagaaattacaagagcttgttcctaacatggacaagcaaacgagctatgcagacatgctggatttggctgtgcagcatattaaaggccttcaaaacgaagttcagaaactccacaaagaattggaaagttgtacatgtgggtgcaaacaaagctcatgatgatgaaggctaaccaggtttaaggaaacaagaagtttgtctgatttccaaattttgaagccaagactaatttagttggcttagtttgacttaataatgaaaaagtagaggtaaacaactcgaagatgtatataaatggagtcacattgtttccctagtttgagaagtgattgagttggaaaatgaaaaaaaagaagcaaattgttagttttacctattaaagttcagtgtctgtaatgtaacatatgttttggcttttgtattttaaatgggaatgaagaattcagtttacatgtttgggtatttaatttaatattttgagtttcttatatgtaaaa

SEQ ID NO: 42 - protein, 333 aa, Gossypium hirsutum
MYPSSSSQKPMGQSGLTRYGSAPGSFLANAVDSVIGADPNLVGHYFSAADSSSLTSESTCKVSSSNDPREPKSAAAAAPAPPHPPPHHPHGSYPAPSSSSLLRQRSSPAGFLSHLTSENGFSVTMGNRNYSSQGSGNGGHGVSRLKSQLSFTRQDSLSQISEVSENLVDGVSSNSNHQNPAHSFAAAGFGMDSWDNTNSIVFSAPSSKRAKNLDGDIYNCFNALETQFSLPQTTLEMATVEKLLHIPEDSVPCKIRAKRGCATHPRSIAERERRTRISGKLKKLQELVPNMDKQTSYADMLDLAVQHIKGLQNEVQKLHKELESCTCGCKQSS

SEQ ID NO: 43 - DNA, 647 bp, Gerbera hybrid cultivar
gtgccgaaaatgagaatgaaatggatgatacttcgttcaacagcttgaaacggagcagaaatggtgatttcttgcagttccaacaagacttagtaccttgcaagatacgtgcaaaaagaggattcgctacacatccacgaagcatcgcagagagggagagacgaacccggatcagcgaacggattaaaaagttgcaagagcttttccctaacatggataagcaaatgaacatagcagatatgttggatatggctttggactacattaaagatctccaaaaagaagtgcagagtttaaatgatgctcgagcaaggtgcatgtgttcaagtaaacaattacagtcaggttcaaccaaatagccccgtgttttaatacacaacttgtaatttctaaataaaaatacaaatttatttatgtgatactaagtttttaaagtatagtattcaaacttgtatcgtataagatatttttgtacaatataagttgtggtataaaatgcttattttgataaaaacaaatatattttagttgtaaacaaatatcatctttagtcctgacactgggatgggtaccctaggtataaaagtatattgtataaaaagtatccgttatttttgcacactcaatattaaacctgaaaatgataa

SEQ ID NO: 44 - protein, 112 aa, Gerbera hybrid cultivar
MDDTSFNSLKRSRNGDFLQFQQDLVPCKIRAKRGFATHPRSIAERERRTRISERIKKLQELFPNMDKQMNIADMLDMALDYIKDLQKEVQSLNDARARCMCSSKQLQSGSTK

SEQ ID NO: 45 - DNA, 967 bp, Glycine max
ccctatccatgtatccctcttcctcttcctcctcctcctcttcctctcagtccatgacccaagctggcctcactcgctacggttccgcccccggttctcttctcaccagcacggttgattctcttattggtggatcccgtcccagtccctacttttccggagagtcttctgagtctccctgcaaagagcaaagatctttccacaaccaccccccctccttcgcttcctccttgctccgacagaaaaactctctcgacggcttcctttcccatctctccaaacaccatggggtggggttcaaccatcacccccgggtggttatcaaatgcaaattcaaattcaattgttctctcttgaagtctcaactcagcttcacccacgaatctctttccaacactgttaatgttgatccctccagcaccaccttcggaatggatccctgggacaacaattccatcgccttttctgcaacttcaaccaagcgctccaaaaccaacaccaatgatcctgacattgtacattccctgaattcagccttgggatcacagttcaatcgtccacatacaagtctggaaatgtcaaccgtggacaagctattgcacattcctgaagattctgtcccttgtaaaatccgtgctaagcgaggttgtgctactcatccccgtagcattgccgagcgggagagaagaacaaggatcagtggcaagctcaagaaattacaggaccttgtacccaatatggataagcaaacaagctatgcagacatgctcgatttggccgttcaacacattaaaggtcttcaaactcaggttcagaagcttcacaaagaaatggagaattgcacttgcggatgcaaacaaagcaaataacttctttttttacgagattctatagcaacgtgcatagaagtcaaggttttgatggcaaagattgaaaactgattttgtaccgatctacttaaatgaat

SEQ ID NO: 46 - protein, 418 aa, Glycine max
MESDLQQHPPMFLDHHQQQMNSGLTRYRSAPSSYFSSIIDHEFYEHVFNRPSSPETERMLTRFVNSLGGGDADAEDSLATTQNPPTVVAVKEEVNQQPPDVTSMNNEPLVLQQQQQQQQQQQQSNNMYNYGSSGTQNFYQSTGRPPLPNQMKTGHGSSSNLIRHGSSPAGLFSNINIDITGYAAVVRGMGTMGAAANNTSEEANFSPATRMKNNAPNFSSGLMSSRAEVGNKSNTQNNNAENEGFAESQGNEFIPAGFPVGPWNDSAIMSDNVTGLKRFRDEDVKPFSGGLNAPESQNETGGQQPSSSALAHQLSLPNTSAEMAAIEKFLQLSDSVPCKIRAKRGCATHPRSIAERVRRTKISERMRKLQDLVPNMDKQTNTADMLDLAVEYIKDLQNQVEALSDNRAKCTCLHKKQQ

SEQ ID NO: 47 - DNA, 2146 bp, Glycine max
aaaattgagggcattctagtaaaactcaaaacaccaaatctgagagctggatttatggctctgttcacttctcattggctgcacctcttcacaaactaaatggaatgctattttataatcatttttcatcttttctcttgaaccttccttcgcccatcttctccaccactccacacaaccttaaatccaaacccaaaccaaacgaaaaacacacacacacacaccccaagagaagaattttctttcttcaggattccgagaagttggtgtgatctgatgcgagtgttaagaagataatctgaggagaaaaaagaaagaaaaaaaagtttcatttttttttttcaatggagtcagatcttcagcagcaccctcccatgtttttggatcaccaccagcagcagatgaattcagggttgacacgttaccgatcggcgccaagttcgtatttttcgagcatcattgaccatgagttctacgagcacgttttcaatcgaccctctagccccgaaacagagcgaatgttgacacgctttgtgaatagtcttggtgggggtgatgctgatgcagaggattcacttgctactactcagaatcccccaactgttgttgcggttaaggaagaggttaatcagcaacctccggatgttacatccatgaataatgaaccacttgttctccaacaacaacagcagcagcagcaacaacaacaacaaagtaataatatgtataattatggctcttctggtactcagaatttttaccaaagcactggacgaccacctttgccaaaccagatgaagactggtcatggaagtagttctaatcttatcagacatggtagctcacctgctggattgttttcaaacattaacattgatattactggctatgctgctgttgtaaggggcatgggaactatgggagctgctgctaataacaccagcgaggaagcaaacttttcaccagcaacaaggatgaagaataatgcaccaaacttctcttcaggactaatgtcatcaagggctgaagttggaaacaagagcaatacacagaacaataatgcagaaaatgaagggtttgctgaaagccagggcaatgagtttatccctgcaggtttccccgttggtccgtggaatgattctgcaatcatgtctgacaacgtgacaggtctgaagagatttagagatgaagatgtgaaaccattttctggtggtttaaatgcacctgaaagtcagaatgaaactggaggccaacaaccttcttcttctgctttggctcatcaattgagtttgccaaatacttctgcagaaatggcagccattgagaagtttctgcagctctcagattctgttccttgcaaaattcgtgccaaacggggctgtgccactcacccaagaagcattgcagagagggttagaagaactaaaattagtgagcgaatgaggaagctacaagatctggtccccaacatggataagcaaacaaacacagcagacatgttggacttggctgttgagtacattaaagaccttcaaaaccaagttgaggcactttcggacaatcgggcaaagtgtacgtgtttacacaagaagcagcaataacggaaaaggaggagggtacccgcgtcattccctgtacagcttagtaataatttggtctagaaactagcgcacctttccgataattatctagctacatcacttcttctgcgcttgtttgggagtgtggtggcaaaagttgagtttatatatgatcgatcaatatttgatgcccacatattcaaggcatggtgtacaaaattttctgatatgtaagtctatttgcctttactcttaggggcccccatttacggggatgatggaggatggggtgagttggaaaatggaaattttcatttttgcatcttcaaggttcagcaataacgtttaaaaaaaagagagagagagagagagagaatgttatgtatgggtttggtttcacattcaaggacatgggaaacatggggggaccgaagccgacatagttttgttggttatatatatacttggatgcctattgagtagtgtgtgtttgtacttttatttttttttcctttttttatgattttaatacgaagtagttgtcattaaaagtatgacacatttga

SEQ ID NO: 48 - protein, 286 aa, Glycine max
MYPSSSSSSSSSSQSMTQAGLTRYGSAPGSLLTSTVDSLIGGSRPSPYFSGESSESPCKEQRSFHNHPPSFASSLLRQKNSLDGFLSHLSKHHGVGFNHHPRVVIKCKFKFNCSLLKSQLSFTHESLSNTVNVDPSSTTFGMDPWDNNSIAFSATSTKRSKTNTNDPDIVHSLNSALGSQFNRPHTSLEMSTVDKLLHIPEDSVPCKIRAKRGCATHPRSIAERERRTRISGKLKKLQDLVPNMDKQTSYADMLDLAVQHIKGLQTQVQKLHKEMENCTCGCKQSK

SEQ ID NO: 49 - DNA, 1105 bp, Glycine max
  misc_feature (1099)..(1100): n is a, c, g, or t
taaatgttacatgcctagtttcaccactgacttctgggatggttctgcattcagtgcctccagaacagctagtaacagaggtgaaatctcattttccacttcaaaggctatggatattcaggatgaagattttggataccaaaaagttggtttgacccaccatttgagtctgcctggctcttccagtaggatggctacaatggagaagctttatcaaattcaaggatctgttccatgtaaaattcgtgccaagagaggttttgccactcacccgagaagtattgctgaaagggaaaggagaacacgaattagcgcaagaatcaagaaattgcaagaccttttcccaaaatcagacaagcaaacaagcactgcagatatgttggatttggcagttgagtacattaaagacttgcagaaacaagttaagattctcagagatactagggcaaaatgcacttgtacaagcaatcagaagcactgatttatatatccttgtagataacaaaaagaaggagcatttttttttcttttcatgtatttatcctttggtgtaccaaaatttttggtcagtgtgattatgtagagtagcgctgatatttgctagtatctaagaatttaggtccaggtccgtgtgagtctcttcagttttgtttttcattttccctcatttgttttttctttctttcctttgcttgatttaagtatcacaatgtaataaaaagtttagaaagagccaattgtaactgttcattttactcataagaggtttgatggcatcacaaaataaaattgagtctcaactgtcacacgctaaagattgagttctatatggaagaaattaccggtgcaataagtagttaagatctttgtattcgtgttgcaaatatagggggtgtcctgattaggagttcagaaaagaggggtggaattgccttgatgttgaaccaatgccaagctatgcacactccagtgcttatcatcatttcagaagggtgatgaagacattagatgtgagaggagaggtctagcttatattagatgtagcaaagaagagtgctgggaatttattttccaatacaccgaatttgttagaacaacnngatca

SEQ ID NO: 50 - protein, 157 aa, Glycine max
MQPTSGGGGLARFRSAPASWLESVLLKEEEEEEDPLSFTQLLSTIDDAPSHSQHQLYGAALSNKDKTPEIFMLEDSVPCRVRAKRGCATHPRSIAERVRRTRISDRIRKLQELVPNMDKQTNTADMLDEAVAYVKFLQKQIEELSEHQRRCKCVVQE

SEQ ID NO: 51 - DNA, 599 bp, Glycine max
  misc_feature (554)..(557): n is a, c, g, or t
agaatggagagctagcaaaccaagttaatatgttatcacatcacttgagtttaccaaaaacttcagcagagatgattactatggagaagttgcttcagttccctgattctgttccttgtaaaatcagagcaaagcgaggctgtgctactcatcctcgaagcattgctgaaagggtgagaagaactcggatcagtgaaagaatgaggaaattacaagagcttgtcccacacatggataagcaaaccaacacagcagacatgttggacttggctgttgaatacattaaagatcttcagaaacaattcaagactctaagtgaaaaaagggcaaactgcaagtgtataagcatgccaaaggcagatacaaatcaaattgcttgatcacctttctttatgagcaatgcatagcaaagatggcttggatcggatgcttttaactttaatgctgagcaagtagaaagaaagatgctaatataggatgctactaccagaaataggagggtgaaaaatagagtagaaataaggtgagaaagatgtgttatttggattgatacnnnnaggagataaacagtagagaaagttctccttacatatttggat

SEQ ID NO: 52 - protein, 357 aa, Glycine max
METMLSKLLPSNNGWSNSEALQEFGGKPVKQEIGESIPQEPPQQNGYSYGGSQLIYQSQQIQGLPNGGSSSASGSAFDGSFGVVHSMASEDSIQSKMGIRNCSNLFRQKSSPAAFFSIENDLAALREVGSFKADDVSNGLVTASTGGLHSSHTFSSRPSSCLKRLPQIAENGNESLEENCDQSRNLVNDNGSSKCYIPSFTNELWESSAFNAPKTENEDEIMFSTSNILESQEADFSFQNLGLTHHLSLPSSSTKMSSIEKFLQIQGSVPCKIRAKRGFATHPRSIAERVRRTRISERIKKLQDLFPKSEKQTSTADMLDLAVEYIKDLQQKVKILSDCKAKCKCTSNEKHYTRTCA

SEQ ID NO: 53 - DNA, 1451 bp, Glycine max
gctgtgtcaacgaggaatcgttcacaagtgagaatcatcatcatcagcagcagcagcagcagcagcattatcttccatctacaagttcagaaatggagaccatgttatccaaattgctaccatccaacaatggatggagcaattcagaagctttgcaagaatttggaggcaagcctgtgaagcaggaaataggggaatctattccacaagagccaccacaacagaatggttattcttatggtggctctcagttgatttaccaatctcagcaaattcaaggcttgccaaatggtggatcttccagtgcttctggcagtgcttttgatggctcttttggtgtggtgcactccatggcttcagaggactccattcaatctaaaatgggtatcaggaattgctccaatctctttaggcaaaagagttcccctgctgcatttttctccattgaaaatgatcttgcagcattgagagaagtaggaagctttaaagccgatgatgtttcaaatggactagttactgcatcaactggtgggttgcatagttctcatactttctcatctaggccatcttcatgcttgaaacggttgccacaaatagccgaaaatggaaatgaaagcctagaagaaaattgtgaccaaagtagaaacctagtaaatgacaatggtagctcaaaatgttacatacctagcttcaccaatgaattatgggaaagttctgcattcaatgccccaaaaacagagaatgaagatgaaatcatgttttccacttcaaatattttggaatctcaggaagcagatttcagctttcaaaatctgggtttgactcaccatttgagtctacctagctcttctactaagatgtcatccatagaaaagtttcttcagattcaaggttctgttccttgtaaaattcgagccaaaagaggctttgccactcacccaagaagtattgcagagagggtaagaagaacaagaattagtgaaagaatcaagaaactgcaagacctttttccaaaatcagaaaagcaaacaagcacagcagatatgttagatttggcagttgagtatattaaggacctgcagcaaaaagttaagatactctcagattgtaaggcaaagtgcaaatgtacaagtaatgagaagcattacactagaacttgtgcttgatttatttgcatgtagatagcaaaaggatggaagattttttagtgtgccaaagttagcaattgtaattagataaaataatgctgacatttgcctggagtgagtttaggaccaggtgaatttttttttttacttttttttttcattttttcccttaatttctttttcttcatagtttgatttaaggatcataaagacctagcatgtttagcatgagttttgtagctcttcattattacatataagaatttatgttgaaatttatatggagactgcttttgctcgtgc

SEQ ID NO: 54 - protein, 156 aa, Glycine max
MPSFTTDFWDGSAFSASRTASNRGEISFSTSKAMDIQDEDFGYQKVGLTHHLSLPGSSSRMATMEKLYQIQGSVPCKIRAKRGFATHPRSIAERERRTRISARIKKLQDLFPKSDKQTSTADMLDLAVEYIKDLQKQVKILRDTRAKCTCTSNQKH

SEQ ID NO: 55 - DNA, 1376 bp, Gossypium raimondii
gatggaaaccaaaaagaaaaaaggagagtttttcttagcttcacaaagctaactcctcaagctgaacaaagaagcagatgaaaccgacgcctggcggcagtagcagctctagtggcggtggcgctgaagggagtcgagctggactcgcccgtttccgctcagctccagccacttggttagaagcccttctcgaggaagaagaagaggaccctttgaagcctagccagtgcttgactcagctactaactggaaattcaacctcaacacccaccattcgaaattcattgctttttcccaactcagcctatccatctgggttgtttgagccttcgggtttccagaggcaaaacagttctccagctgattttcctgggaataatcctgctgcttcctctgatgcctacttctctaactttggagttgttgcaaattatgactatttatcgccaactatggatgtttccccctcgagtaagagggctagcgagcttgatacgcaattcccaccaacaaagttccattctcagttgaaaggagagccaagtgatcagatttctggtgggatatctaatcttatagatgtagatatggagaaacttttggaggattcggtaccttgcagggtccgtgcgaagcgagggtgtgctactcatcctcgaagtattgcagaaagggttcggagaacacggattagcgatcgcattagaaagcttcaggagcttgtccccaacatggataagcaaaccaacccggcggacatgctggaagaagcggtggagtatgttaaatatcttcaaaggcagattcaggaactcacagagcatcaaaagagatgcaaatgcaaagctaaagattgatcgactaccaagagcttttagtgtaaaccgtctcgcctacagtgataaagttgggtggtagatcccccctgtaattactagatttcccccctacgatgttgcatttttcagcatgcaatacctagatgtggctgcttttgaagctaactatagccctcatatcaggacctctgctttgctttgcctagtactgctcctggaagatcaattggtataattgtacttgtccaatattgacgtagactataaatatttttttattaactatatagctataatatatatatatatatatatatatcccatttttaattaagatatttgtttctccataattcatattgtatatttagataattgtattcagtgaagttctttatttccattttaagaatcggtgaggatctgtgttcgaggtttcagatatttgttgttgacctgggaatggcatgatcccaggaaaagaaattgcttgctttgtatggtgatttttttacaaattcagatgataacaatggc

SEQ ID NO: 56 - protein, 259 aa, Gossypium raimondii
MKPTPGGSSSSSGGGAEGSRAGLARFRSAPATWLEALLEEEEEDPLKPSQCLTQLLTGNSTSTPTIRNSLLFPNSAYPSGLFEPSGFQRQNSSPADFPGNNPAASSDAYFSNFGVVANYDYLSPTMDVSPSSKRASELDTQFPPTKFHSQLKGEPSDQISGGISNLIDVDMEKLLEDSVPCRVRAKRGCATHPRSIAERVRRTRISDRIRKLQELVPNMDKQTNPADMLEEAVEYVKYLQRQIQELTEHQKRCKCKAKD

SEQ ID NO: 57 - DNA, 680 bp, Glycine soja
tggcaatgatggtgaacttagtctatctatgaacagaatgaagaatcacattagcttctcatcaataagtccttcttcttccttgggaatgctatcaccaacctccaaaatgggcacggagggtattagggtaactagacctgaggatgggagacagggaagttgcaatggtgatgctcgatattatggtcctggattcccttatgcttcttggaatgagccctcacaccccaaaagacagcgaagtagtaatgatgagttactttttgattctcagaatggagagccaggaaatcaagttcaaaggctttcgcatcatttgagtttgccaagaacgtcgtcggagatgtttgctatggataatttgcttcagttctcagattctgttccttgtaaaatcagagcaaagagaggctttgctactcatcctcgaagcattgccgaaagggtgagaagaacaaggatcagtgaacgaataagaaaattgcaagagcttgttccaaccatggacaagcaaactagcacagcagagatgttggacttggctttagactacataaaagatcttcagaaacaattcaagactctgagcgataaacgggctaaatgcaaatgtataaacatgcagaagtcagaagcagatcgagttgcttgagtttcttttgtacagggctgccagg

SEQ ID NO: 58 - protein, 208 aa, Glycine soja
MNRMKNHISFSSISPSSSLGMLSPTSKMGTEGIRVTRPEDGRQGSCNGDARYYGPGFPYASWNEPSHPKRQRSSNDELLFDSQNGEPGNQVQRLSHHLSLPRTSSEMFAMDNLLQFSDSVPCKIRAKRGFATHPRSIAERVRRTRISERIRKLQELVPTMDKQTSTAEMLDLALDYIKDLQKQFKTLSDKRAKCKCINMQKSEADRVA

SEQ ID NO: 59 - DNA, 700 bp, Helianthus ciliaris
ggattttagaaacgttatactactgacaatggttaccctatgatgagatcaatcgaagaatttcgattattgtcacgtatccctgaacacgagggaaaaaacaactaccctggtggttcttgggacgattcggcaatgttgactgatgggtttcttaacgaatttgaagaaagtcaagaaaaattgaatgatggagggaggataactcaagcaactcatgctcccactgggttgactcatcagctgagtttgccaactgagttgtctgtgaaggagaaactaatgcattttcaagataatgtgccactaaggagcagggctaaaaggggttgtgccactcatccaagaagcattgctgaaagggtcaggcggacacgaataagtgaaagaatgaggaagctgcaagatcttgtcccaaatatggataagcaaacgagcacggcagacatgttggatttggctgttgagtatatcaaagaacttcagaatcaagttgagactctttcagaccgtcaacgaaagtgcacatgtccacataagctggagtcgtaacacaagtttaagcatagttatttctcgcttttgtatataatacatataaattcaagtaatcgaagaaatagaagattcttgtttggtaatttaactccgtttgttatgtaacatttagcatattcttaattctctagccattctaaat

SEQ ID NO: 60 - protein, 170 aa, Helianthus ciliaris
MMRSIEEFRLLSRIPEHEGKNNYPGGSWDDSAMLTDGFLNEFEESQEKLNDGGRITQATHAPTGLTHQLSLPTELSVKEKLMHFQDNVPLRSRAKRGCATHPRSIAERVRRTRISERMRKLQDLVPNMDKQTSTADMLDLAVEYIKELQNQVETLSDRQRKCTCPHKLES

SEQ ID NO: 61 - DNA, 625 bp, Helianthus paradoxus
  misc_feature (496)..(496): n is a, c, g, or t
acgtgctgaaaagcgcttatgatttctttagaccacacttacaaatgagaagaaaacactcacgttacttaggtgtgatctttgttgatttcaaaatggattatcctcaccttaaacacccagtattgccaaccctttacagcttgactcaaaacttcactctgacatggaatttgacgacaagatccttgcgacttgaactacacttgcatcctacaacgagtcctacaccacaatcaagcgccacacacccgccaagcatagctgagagggtgagaagaactcgaataagtgatagaatgaagaagcttcaagagctcttccctaacatggacaagcaaacaagcacagcagacatgttagatatggctgttcagtacattaaagatctccagaaagaattggagactctcagagatgcgcggtcaaagtgcgagtgttcaaggaaacaataacatatgttggatcatataacttgctttctgatacgtcttanaatggaaaaaagacgagtgtagtttaggtttattcgatcaaacattctacttcgagctgtattgcccgtggcgactctcatcatcaaagtgtggatcattgtgattatcatttgtaactcatgaagtag

SEQ ID NO: 62 - protein, 136 aa, Helianthus paradoxus
MRRKHSRYLGVIFVDFKMDYPHLKHPVLPTLYSLTQNFTLTWNLTTRSLRLELHLHPTTSPTPQSSATHPPSIAERVRRTRISDRMKKLQELFPNMDKQTSTADMLDMAVQYIKDLQKELETLRDARSKCECSRKQ

SEQ ID NO: 63 - DNA, 883 bp, Helianthus petiolaris
atagagatcaaaccaaatgcaacccacacacggtggcactagcggcggctccggtggaaccggtaccggactttccaggttccggtcagctccggcaacatggctagaagctctactggaatctgaagaagaagacgtcatcattgatccacccaaaccaaccttaacacctcctattgttcctcgtgttcatcaacacacttccattgcaacaacaacaagtgacacaaaacctacgtttgttgatccgaatcttctcatacctaatcccatcggtctccgacaaaacagttctcctgctgagtttctttctcagatcaacaatcccgatgcgtttctacctaactactcaactgctggttttgatgattatctttcatcttctagagacatcggtggtgggtctaagttcaccactcagctgagtggagatcaaagtatgttgttggagggtgatatggataagatgttgggggattctgtgccgtgtagagtgcgggcgaagcgcgggtgtgcgactcatcctcggagtatcgcggagcgggttaggaggactcggattagtgacagaataaggaagcttcaagaactggttccaaatatggataagcaaacgaatacagcagatatgttagacgaggcggtggagtatgtcaagtttctgcaacgacagattcaggaacttagggagcatcaagacaaatgcacatgtcagtcaatatcaacatgaagaaatgactcaatggtgtttatgttgtaaacatcgctccttttgtgctatagtgcttcttccaacacctgagatcaaattattattttttttgtttcgtgagtcgtgtaatactattagaaacgagtagattagggttatatatgcgatgct

SEQ ID NO: 64 - protein, 237 aa, Helianthus petiolaris
MQPTHGGTSGGSGGTGTGLSRFRSAPATWLEALLESEEEDVIIDPPKPTLTPPIVPRVHQHTSIATTTSDTKPTFVDPNLLIPNPIGLRQNSSPAEFLSQINNPDAFLPNYSTAGFDDYLSSSRDIGGGSKFTTQLSGDQSMLLEGDMDKMLGDSVPCRVRAKRGCATHPRSIAERVRRTRISDRIRKLQELVPNMDKQTNTADMLDEAVEYVKFLQRQIQELREHQDKCTCQSIST

SEQ ID NO: 65 - DNA, 1454 bp, Hordeum vulgare
cccacttgcaccacccccgccccgcataggataggccacgccaatattccacgccaaaacacacgcgcaggccagcgatagccccggctcggccgtcgacgacccacgccaccccgtcgatcgatccaccagtacgtgtccggccgctcgtcgacgcatgctgatgcagctgcgccggaagcgggcttgtttttgctaaccgcacgatcgacatgaggaggttcttgccggcgggagcaggggagccctcctcctcgtcgtcgtcggggccgcacgggaagcacgagggcagcgaggccgccgccgctgctggtggtctgcggtatggaggcggagacatctcgctagggcgcggcaacgacctcctccacgcccagtttcgcggcggcgagggggagatgaaggacgacggagcggacatgctggcccggcacagtagctcgccggcggggttcttctccaacctcatggtggatgacggatatcatggctcgagaggcgccggagtagctggtggcagcggcgaagcccaccgtaacaccagtagcagcacgaagatgaaatcccagctgagcttcacgagcggcgggccacagactgccgcgcacctctcgcgtatctccgagggcgcctccttattccccggcgccgacgtcgtccgcgctgctgcgcactcgggcggcgagcaccccgtgtcgcgttccttctcggccagcggcagtagcgggggcttctccatcgtggggccgtgggatgagtcgagggagatcatcggcaccctcgatctcggtggttacgagtctcagtttagtggcatggcgagctcgtcgtcgctggagctggccgggatggacaagtacatgcaggcgcagcagcagcaggaccaggttgggttcaaggtgcgggccaagcgcggctgcgcgacgcacccgaggagcatcgctgagagggaacgcaggacgaggatcagcgagaagctcaggaagctgcaggacctagtgcccaacatggacaagcaaacgagcacctcggacatgttggacctcgcggttgagcacatcaggggcctccagagccagctgcaggtcatgaagcacgagcaggacaaatgtacctgctgcagcaagccttgagcaatttagcaggggaccagtaactgatcagcacaacgcaatggatgacaccacctttagtcgagagaaatgcacatgacgcatgaattagtgcatgccaatgctaaatgagtacatgcagctcaacggttcatactttctcaaggcggcaaggaactggcagccgtacgttctcatggacccttcaacttgttcccagtcattggccataattatcatgaagcaggtagctggtagattaggtacctcttccgtttccacgaaaacgtgaattttggttctaactgctgagactgagaatttttattctatattcttcat

SEQ ID NO: 66 - protein, 196 aa, Hordeum vulgare
MSQISEMVGEEMGGGGSSGDDDEAGSYGGIPGYPVVAPSGTGWDEPSPSPPPSLLTSDGMSGPAAKRRPREAANGRSGQLKPQFSLPAGSKPSPEIAAIEKFLQFQDSVPCKIRAKRGCATHPRSIAERVRRTKISERIRKLQELVPNMEKQTNTSDMLDLAVDYIKELQMQVKVMNDGRAGCTCSAGRPQKHFAG

SEQ ID NO: 67 - DNA, 2160 bp, Hordeum vulgare
  misc_feature (10)..(10): n is a, c, g, or t
cggcacgagngccccctttccgcccaaacaaaccgccccctccccctccccctcccgtcgccctcacctcctccttcgccggcagtatactactaccactccccgccaccagctccgacgacccgcgccttccctcccgcccgcccgcgcaccgtcgtctcccgtccccccgccgcgggtttgttctagagggtgtatttgtataaaaggaattcaggccatcaaagactgtcttacaatatcaagttaaattcccttttcatggatgagtgataggatcttcagttggccactttaagtatctagaagccactcttttcttaatatttctgagcagaggctgtgaagtcaaattgtaagggtgtaagatgaactactctgatggttctttctttccttcatggcctggcaattccgcttctgagaactatagcttcgttgatggttcagtggaatcatatacagaagaaggaagtatgccaactacaggctatttcagagctagatcaaatcagaatttaacatttgatgagcatgaacagaaccctgctatgcttgcaaatggatgcttgccatacaacactcagactgatctattatctggcgagattctatcagacgacaagccttcaaacagccttgtggagctttcacaacttcagaacaatgtctgtctgcaaaataatttaattcccccagggactcttcagtgcaattcaacacctggaacttttgacctgcagttggatacccctggccttctggaactacctcatgccttgtccagttcaattgaaagcaatggtagtgaagtttcagcttttcttgctgatgtacaagctgtttcttcagcctcgactctgtgttccacatttcaaaatgttccttcctacatggaaccagtaagcctagaagctttcagttttcaagggatgcaaaatgctgctatgttcaacaatgcaagtcattcaaatgggaacctgtcagtatttgatgaggcaaccatggcatcactacatgatagcaaagagtttctcaatggtagcatctcatctcttggtaccggccagcaatcacaactagctggtggtggtttgaaggctgaacaacaggagcaaaatacaatgtgcaatattccgctcccttctttcgtttctgctagtcagatggcagtgagtgaagcacaaggggcactgattccttcaaagacaacatcaataacccataacaataaaagtgagtaccctatccctatcagccattctgctgatgtgcagcataaggcaaattcaggtaatggaaatagtgccagtgctaaaccacgagcaagagctcgacgtggacaggcaactgaccctcatagtattgctgaacggcttcgcagagagaagatctcagagaggatgaaaaatctccaagaccttgtaccaaactcaaataaggcagataagtcatcaatgctcgatgaaataattgattatgtgaaatttcttcagcttcaggtgaaggtcttaagcatgagtaggctaggagctcctggggcagttcttcccctcctcgcagaatctcagactgagggccgtagcaattcacctctatcatctccaaccacctcacaagggctactggacgtagcaggcccagaagatagcttggtgtttgagcaagaagttataaagctgatggaaacaagcatcaccaacgcaatgcagtaccttcagaacaagggcctctgcctgatgcctatcgctcttgcttcagccatatccaaccagaaaggcacttctgcagctgcaatccctcctgaaaggtgaaaacagaaagcacatcatgctcctcccatcggcacgcggaaacaactgtcgaaatgtgctagagttaatagaagttatgagaaaactaaaatccgagggtgaaggataggaagttatgcgactaatagtacaagcttatggtataatctagtagcttactccaagaaacctatactttttctattctctgttgcacatcagttgatgtgtattcttttgttttttggacggcattgctaacttggtacaagtgtctggcaccttgggttgtagatggatctatgaggtttattaccgactgttcatgcaggttacagctttactaaatctgtttttccttattgct

SEQ ID NO: 68 - protein, 306 aa, Hordeum vulgare
MRRFLPAGAGEPSSSSSSGPHGKHEGSEAAAAAGGLRYGGGDISLGRGNDLLHAQFRGGEGEMKDDGADMLARHSSSPAGFFSNLMVDDGYHGSRGAGVAGGSGEAHRNTSSSTKMKSQLSFTSGGPQTAAHLSRISEGASLFPGADVVRAAAHSGGEHPVSRSFSASGSSGGFSIVGPWDESREIIGTLDLGGYESQFSGMASSSSLELAGMDKYMQAQQQQDQVGFKVRAKRGCATHPRSIAERERRTRISEKLRKLQDLVPNMDKQTSTSDMLDLAVEHIRGLQSQLQVMKHEQDKCTCCSKP

SEQ ID NO: 69 - DNA, 786 bp, Ipomoea nil
  misc_feature (775)..(775): n is a, c, g, or t
caggcgcaatggcgtctatatctgaaattggagaagagggactgaaagaagaaaccagtcccagggcatggaggatttagtgaaactcagaaaaatgatgagttctccatgccatattgggaagattcagacattttgtctgatcttttcctaaatggatcagaagaaaagccattttcaaatccaaatgtatcagatattcagagcgaagatcaaactcgccctcctggcctgctgtctcatcacttaagtttgcccaaagttcctgcccagttatctgccataatgcaagattcagtgccctgtaaggtcagagcaaagaggggttgtgcaactcaccctcgcagtatcgctgagagggttagaagaaccaaaataagtgagaggatgagaaagctgcaagagctcgtcccaaacatggacaagcaaacaaacacagcagatatgttggacttagctgttgactacatcaaagatttagagtcccaggtccaggtgttatcggaaaaccgggctaaatgtacatgctcatcaagtaaatagaaagtcacagacatagaggaccaggtagggcacacatctgcaaattaatggactgtcaaaagtatatgagaatggggtagcattttggttggtaaaatgagcatatagactaagctgtatataaaaccattaatctgtattttttgggttggtctcttttgttagccataaaaaggaataccaaggaggaggaggagggctttgatatccatatcctccaccttacctttcngaaaaaaattc

SEQ ID NO: 70 - protein, 144 aa, Ipomoea nil
MPYWEDSDILSDLFLNGSEEKPFSNPNVSDIQSEDQTRPPGLLSHHLSLPKVPAQLSAIMQDSVPCKVRAKRGCATHPRSIAERVRRTKISERMRKLQELVPNMDKQTNTADMLDLAVDYIKDLESQVQVLSENRAKCTCSSSK

SEQ ID NO: 71 - DNA, 762 bp, Ipomoea nil
tgttcgggggatggcgtcgggggcttcaatgaagatcagacaatggatgaaagttacttgtcaagtttccctataccttcttgggatgatttagatctcttgtctgatgacttccttaaagtaacagatgaaaagccaagtttgaaagcaaaagcaccagattttaagaacacagaaggtagtcgaagtcgccctcccggccgtttatctcatcacctcagtttacccaaaagctccgaggagttatcgtccatattgcaggattctgtgccttgcagggtccgggcaaagagaggttgcgctactcaccctcgcagcattgccgagagggttagaagaactcgaataagcgacagaatgaggaagctgcaagagctcgtcccgaacatggacaagcaaacaaacacagcagatatgttggacctggcagtggattacattaaagatctagagcagaaagtgaagaggttagctgataatcgtgccaagtgtagatgctcgaataagtagtagggcagggatgtaccgatgaatgtaacgtggaaagttgatgaacattgtgggattcctcctggcactaaattaatcacagatcaaaagaagaaaatgggatgggagtgccacaaaaacaatttcatttgatgtaacatatgaagcgctgttgaacataaaagcattaatgtttgtgttgggtgtacccctctttttgtccataaataatgaaaagaatttggtaggctcgagtgtcctttacacgctatt

SEQ ID NO: 72 - protein, 159 aa, Ipomoea nil
MPSIAENESWNDSSFNCLKRSRDGDFKMLSALNGIESQNGGERRNCTPGLTHHLSLPSSVEIEKYLHFQQDAVPCKFRAKRGCATHPRSIAERNRRTRISERMKKLQELFPKMDKQTSTADMLDWAVDHIKELQKQVQILTDKKAKCTCSSEAQKGGML

SEQ ID NO: 73 - DNA, 1337 bp, Ipomoea nil
  misc_feature (1255)..(1255): n is a, c, g, or t
  misc_feature (1302)..(1302): n is a, c, g, or t
  misc_feature (1310)..(1310): n is a, c, g, or t
gatgcatattctctctctctctctctctctctcagctctcagacaagttttcctgacaagacatattgcgttaattacagtatattagaaaatatatagtacgagaaaccggcgatcagcttatgggtagcagtatgcttttcccgccggttcaattgcagggtttgatgaactatgacgatcagaatctcatccagattctggagaattatggctggattgaacggccctcagacattggaatcaattacgcactttccagctgctcaccagccgccacctctgcagctgggaaaaagaaagatgacgcttttccgccggaaaatctgggaagagagagcttcaagaggagaaaaaccgacaaggcagttgcagttgcagaagaggaaagaaaggacaggtggaagcagaaaggatgccaagaagatgtcagaagttcagagcagactgacaacaatagtaagaaagaacatagcactgacacttccaaggtaacacaagacaaaaagtcagactacattcatgtccgggcacgacggggccaagccactgacagtcatagtttagcagaaagagtgaggagggaaaaaatcagtgagagaatgagatacctgcaggatctagtaccagggtgcaataagatcactgggaaagcgggaatgctagatgagataatcaactatgtccagtcactgcaaaaacaagtagagttcttgtcaatgaaactggctgctgttaatccaagactcgatttcaatattgacagtttattcaccaaagagatgtttcaatctagtccatctaattttcccccggttggaataatatcagatgtgtctactccttccaatctgctgcaattagttgcatctttgggattggaaataggcataagtccttcagatatgcctcttagaacaaccattaattctcctgtctcactacccaaaacactcctcaattcgtccgctataaatcagggacagacctgtccaatttgggatggagagttacaaaacctgtatgccatggaggttcaacaaggaagatcaccatccttcacttcacagccatttatgggttttgtagaaggcagtaatccaaggatggagatctgagccggaattcagattcttgaatcagttctttcagaagttaccaaatactagctgattctttcttccaagtacataaacatatatgtctgtatgtatacataaggtgtacaaatgtcatactggcagtatgctatcantattcaactctcatattttataaaaagagaagcttttgtatatacanatatatantatatatatatatcgaaccaagaaacc

SEQ ID NO: 74 - protein, 277 aa, Ipomoea nil
MQPESGAGGGGSEPSRGAGLTRFRSAPATWLEALLDSDTENDVVLDPPPILPSSSKPPPHPHSQPLPTPPAQLKQASVGGSGSRYAADLGLFESGGGGGEAASGLSNFVRQNSSPAEFLSQISSDIFFPSFGAPPSYDYLSSPMDVAQSAKRPREADSQSPSAKLSSPLKGEQSGRLRSAGGSLDAEMEKMMEDLVPCRVRAKRGCATHPRSIAERVRRTRISDRIRKLQELVPNMDKQTNTADMLEEAVEYVKFLQKQIQELTEHQKKCTCSTTEQ

SEQ ID NO: 75 - DNA, 1294 bp, Ipomoea nil
gctctcgggttcttgcctcttgctcacagtaacaccacaaaattcacctgaaaacggggataacgatatatccggatatagaaagtaaccgatgcagccggagagtggcgccggaggcggcggaagtgagccgagccgaggagcaggactgacgcgcttccgctcagctccggcgacctggttggaagcgctcctggattccgacacggaaaacgacgtcgttctcgaccctcctccgatacttccttcttctagcaagcctccaccgcacccgcactctcaacccttgcctacgccaccagctcagcttaagcaggcgtctgttggcggaagtggctccagatacgccgccgatctgggcctattcgagtccggaggcggtggcggggaagcagcatctggacttagtaatttcgtcaggcagaacagctctccggcggagtttctctctcagatcagctcagatatcttcttccccagcttcggagctccgcccagctacgactacctttcttctcccatggatgtggctcagtcagctaagcggcccagagaggccgattcccaaagcccctccgctaaattatcatctcccttgaaaggagaacaaagtgggcgattacgcagtgctggtgggtcgttggatgcagaaatggagaagatgatggaagatttagtcccatgcagggttagagcaaagcgtggttgtgctacccatccccgaagtattgcagagagggttagaagaacgcgaattagtgacaggataaggaagcttcaggagcttgtgcctaatatggataagcaaactaatacggctgacatgttggaagaagcagtagaatatgtcaagtttctacagaagcagattcaggaactcaccgagcatcagaagaaatgcacttgctccacgaccgagcaatgagagagagaaagagagagatcactgagggtttcctgcagtaaataggcaataatatggggttttggtatctcggatacaatcatccgagatatggtattttctcttttatgtcatactattctgcatgtctagatgttggcaagtagaacccataatttttacagtagaattcacgctcaatcagctctagctactccacgcataataacctagattattgtattcctacttgtaaaatgctgtataaagtagtatcgttcaataagatagtcacaaatcttcacctgaaaatctatgttcatgacgatgtacttaaaaaattcgtgcccatactcctgcagcatagtgggtcaatatcagatcaacaag

SEQ ID NO: 76 - protein, 155 aa, Ipomoea nil
MDESYLSSFPIPSWDDLDLLSDDFLKVTDEKPSLKAKAPDFKNTEGSRSRPPGRLSHHLSLPKSSEELSSILQDSVPCRVRAKRGCATHPRSIAERVRRTRISDRMRKLQELVPNMDKQTNTADMLDLAVDYIKDLEQKVKRLADNRAKCRCSNK

SEQ ID NO: 77 - DNA, 997 bp, Lactuca sativa
  misc_feature (861)..(861): n is a, c, g, or t
gcggggagctgcttcttcacgaccttcatctctctccatcttccccatttctggcaaagaaagattgatatgtatcccacctccaattcatcttccgcatctcagacttcaggaggagatcctaacgccatcaatggcagtaacgttagcggcggtgggggaggagcacagcaaggcctcgctcgctaccgttctgctcccgtctcctttttaaccaccaccgtagactccgtcatcaatgggcaaacccaacataccaccgtcggaaatcacaatatggttggcggaggcggaacccctactcgctttttctcacctccagactcgacatcttcgcatctctccaccggagatcggttacaaaccacctcattccgtttaaacgagttcgcaaccgcttttaatggtttgaaaggtacatctcagactccgtctcccttattccggcacggcagctcccccgccggttttctcaacacccttgtttcttctacccccactgacggaaggggttcaagattaagctctcaacttagtttcactggaacaagttctttttctcaaatatccgaagagaataacattgcaaattccctaatgttttcaaactcatcgcataacaaaagagctaagcttgacatcaatggtcttaatgtcatggattctgagcttaattttgggctatcagaatctgctctagaggcagccacgatggagaagatgatggaccttcctcatgattctgtcccatgtaaaatccgtgccaagcgtggttgcgctactcatccccggagcattgctgaaagggaaagaagaacaagaataagcgggaagctgaagaagttgcaagatcttgttccnaatatggataagcaaacaagctattcagacatgttggacctggctgtacaacatataaaaagccttcaaactcacgttcagagcccttacaatgaactccaaaattgcaagtgtggatgcaaaccccaatgaaaat

SEQ ID NO: 78 - protein, 307 aa, Lactuca sativa
MYPTSNSSSASQTSGGDPNAINGSNVSGGGGGAQQGLARYRSAPVSFLTTTVDSVINGQTQHTTVGNHNMVGGGGTPTRFFSPPDSTSSHLSTGDRLQTTSFRLNEFATAFNGLKGTSQTPSPLFRHGSSPAGFLNTLVSSTPTDGRGSRLSSQLSFTGTSSFSQISEENNIANSLMFSNSSHNKRAKLDINGLNVMDSELNFGLSESALEAATMEKMMDLPHDSVPCKIRAKRGCATHPRSIAERERRTRISGKLKKLQDLVPNMDKQTSYSDMLDLAVQHIKSLQTHVQSPYNELQNCKCGCKPQ

SEQ ID NO: 79 - DNA, 931 bp, Lactuca sativa
cggcgggggttgcagagcatttactcctgtgaagcggtgacgtagcagttgtttcctccaatccacctcttttcactcatcttttttatcgtaaataaattaaaaatctgtagtagcaagataaacacgagttgcttaaccaaaaggtaatccaacagaggagtaaagatgcaaccgacaggcagtggcggtggtggaggactatccagattccggtcagctccggcgacatggctggaagcactgctagaatcagaagaagaagatgtaatcattgacccaccaaaaccacctccacatcagcaagcttccattgcaggcacccccaccccctccagacctacttacgttgatcccaatatcttcttacctagccgacagaacagctctcccgccgaattcttttctgagatcaacaatcctgatgcctatctctccaattacgacgactacctctcatcgtcctaccacaacgttaaaccatccagggctgtcgatgtagacgaccaacaacccaagttcaccacacagctcagcggagatcagagcgcgttgttggatgttgagatggataagcttctgggggattcggtgccgtgtcgagtacgagcaaagcgcggatgtgccactcatcctcggagtatcgccgagagggttagaaggactcggattagtgacagaataaggaagctccaagaactggttccgaatatggataagcaaaccaatacggcagacatgctagaagaggcggttgaatatgtcaagtttctgcaaagacagattcaggaactaaaggagcaccgagacaaatgcacatgtgtggttgacgattgataacagaaaagaagctaacctttttttgatcgtggttcaagggatcataatggaggactatggtgcttatccaaaatctcagatcaaatatatt

SEQ ID NO: 80 - protein, 222 aa, Lactuca sativa
MQPTGSGGGGGLSRFRSAPATWLEALLESEEEDVIIDPPKPPPHQQASIAGTPTPSRPTYVDPNIFLPSRQNSSPAEFFSEINNPDAYLSNYDDYLSSSYHNVKPSRAVDVDDQQPKFTTQLSGDQSALLDVEMDKLLGDSVPCRVRAKRGCATHPRSIAERVRRTRISDRIRKLQELVPNMDKQTNTADMLEEAVEYVKFLQRQIQELKEHRDKCTCVVDD

SEQ ID NO: 81 - DNA, 877 bp, Lactuca serriola
cccctttccaccctcctcctaagccctctccgctactccctttctaacccagattacgattctccggcatggctacagacccgccggagggctacggagacgacttccttgaacaaattctcgcgattccttcttacaacatcgccggatgcttgcctggtaatactaccgacgctaatgcttctgaaacggtgtctgttcatcgtcaacagcaacagcagcaaccggtgtttccgttaggtttgagccttgataatggccgtgaaacaatcggagcgtttgcagggcagcagcagcagcagcagagggagagaggagggagcatgaacatgactggattgtttccttcatttgaaaatttacagtcacattctctgcttcattctgttcctcaggctttccaagggcaatcaactaccagtacagctgtcactgttccccatccaccttctattcgccctagggtgcgggcccgcagaggacaagctacagatcctcatagcatagctgagcgtctacgccgagaaagaattgcagaaagaatgagggctttgcaggaacttgttcctagctgcaacaagaccgataaagctgcaatgctagatgaaattcttgattatgtgaagttcttacggcttcaggtcaaggttcttagcatgagtaggctgggtggggccggtgcagtggcacaactcgtatctgacgtccccttgcaatccgttgaggtaactttcacaaacaaacattttatcattaatagtaaaaatatgaaacattgttgtatatagggggacacgagtgaaaatggatataatcaaccggcatgggaaaactggtcaaacgatgacacagaacgtgaagtagcaaagctcatgga

SEQ ID NO: 82 - protein, 222 aa, Lactuca serriola
MQPTGSGGGGGLSRFRSAPATWLEALLESEEEDVIIDPPKPPPHQQASIAGTPTPSRPTYVDPNIFLPSRQNSSPAEFFSEINNPDAYLSNYDDYLSSSYHNVKPSRAVDVDDQQPKFTTQLSGDQSALLDVEMDKLLGDSVPCRVRAKRVCATHPRSIAERVRRTRISDRIRKLQELVPNMDKQTNTADMLEEAVEYVKFLQRQIQELKEHRDKCTCVVGD

SEQ ID NO: 83 - DNA, 960 bp, Medicago truncatula
atggatttgaattctcattatcagcaactccaacaaaaccaaccaaattcaaggttgcttcgttttcgttcaagtttcaaacaacaaggtgaaggttgtggtggtagtgcaactgctgctacaaattctggtgaaacttcttcatctacctttagagaattcatggaccataacccttctaatcataaagttgacaacaacgagtcttcattatcacaaagacacatgaattctcagcagggttatagaatggatcaacacaaaggtttttataccaatcttttaagacaaagtagttctcatgatggtcatttctccaacaacaacatcatctcctttggaaatgggtatgaacctatgaaaggtgttgaaaactatgatggggtgaaggacagtgatggtgaacttactctatctatgaacatattaaacaatcaaattggcttctcaccaagaactccttcttccttcagaatgttatcacagaaccctaaaactgggagtgatggtattggaacaactagccacgatgatcgaagacaagtaggtagcaatgacgacgctcaatattatggtcataaactcgtttatgattctaatgaccagaatgtaggggtacgaaatcaagttgatacactatcacatcacttgagtttgccaagaaaatcatcagaaatgtttgttgtggagaaattgcttcagtttccagattctgttcctagcagtatcagagcaaagagaggctttgcaacacatcctagaagccttgccgaaagggtaagaagaactcggataagtgaacgaatgagaaaattgcaagagattgttccaaacattgataagcaaacttgcacatcagaaatgttagacttggctgtagagtatattaaagatcttcaaaaacaattaaagactatgagtgcaaaaagagctaagtgcagatgcagaaacaagaaatga

SEQ ID NO: 84 - protein, 319 aa, Medicago truncatula
MDLNSHYQQLQQNQPNSRLLRFRSSFKQQGEGCGGSATAATNSGETSSSTFREFMDHNPSNHKVDNNESSLSQRHMNSQQGYRMDQHKGFYTNLLRQSSSHDGHFSNNNIISFGNGYEPMKGVENYDGVKDSDGELTLSMNILNNQIGFSPRTPSSFRMLSQNPKTGSDGIGTTSHDDRRQVGSNDDAQYYGHKLVYDSNDQNVGVRNQVDTLSHHLSLPRKSSEMFVVEKLLQFPDSVPSSIRAKRGFATHPRSLAERVRRTRISERMRKLQEIVPNIDKQTCTSEMLDLAVEYIKDLQKQLKTMSAKRAKCRCRNKK

SEQ ID NO: 85 - DNA, 1224 bp, Medicago truncatula
atgcagccttgtagcagagaaatgcaatctcttaactctctcttcaactcttcttcttcttcttcttctgaaattcccattcctctccaaagtcagatccaaattaacaacaacaacaacaatcacaacgacacattcaaccatcacgacgattttctcaaacaaatcctctccaccaatcttcctccttcatggaacactctcgacccaaaccataacaaacccttattatgggaccccaattccgacgaaaatgtcactttccctaattacgatgaacaacacaacaaccttgcctctaagtttcgtaaccaccagatcactgacaaaaccgccgccgctctcatgcttctcaccgccgattccggaggtctcctccacatgcctgctgactttgactcctcccaaaacgacgtcgttaacacctcctccgctgctggtgatgcttccgttcaagctctcttcaacggtttctccggatctctccacggtgtcgctcaacctcaccattttcaacctccacaggggcagagttttggaagtggttcggtgagtgcaacgaaccaagctccggcaagtggcgctccggctcagccgagacaaaaggttagggcaaggagagggcaagccaccgacccacacagcatcgccgaaaggctacggagggaaagaattgctgagagaatgaaagctttgcaggaacttgttcctaatgcaaacaagacagacaaggcttccatgctggatgagatcatcgattatgtgaagttcctacaagtccaagtcaaagttttgagtatgagcagattaggtggagcaggggctgtagctcctcttgtggctgatatgtcctccgagggtgtcagtgactgcgtccaaacaaacggcaacggaggggtccacccacgaaaccctaaaacggcgtcgtcctccaacgaaagcctcaccatgacggagcatcaagtggccaagctaatggaagaagacatgggatctgccatgcaatacttacaaggcaaaggtctttgcctcatgcctatttctcttgctactgcaatctctactgccacgtgtcacaccaggaaccctttgatcaatgctgctaataataacatcaacggtagttccaaccctatcaccgcatctaacggtgatgggccatcttctcccggaatgtccgttaacagcatcgtcaaagatgctaactccgcttctaagtcgtag

SEQ ID NO: 86 - protein, 343 aa, Medicago truncatula
MYRPPSSSASSSSSSSQQQQSSISQTGLTRYGSAPSSLLNTTVDAIIGGSRLLPGTGQHYFSDDSTQQQQQHHHQQQQQQQQQRSSYEGQGGGFDGSALLRQKSSPAGFLNHLATLNHNNNNNNNNNNAGGGFTITRGNSRLKSELSFTGGGQECLSRISENVVDYASAAAAAGNGSLHTNSTNTWGGGGPDNNNNSNSIVFSSSQTQTNNNSKKRSSRTDPNDDPDLLLHCLNALETQYSLPQTSLEMDQLMHNIPQDSVPCKIRAKRGCATHPRSIAERERRTRISGKLKKLQDLVPNMDKQTSYSDMLDLAVQHIKGLQTQVQKLHEDLENCTCGCKQST

SEQ ID NO: 87 - DNA, 775 bp, Medicago truncatula
ttatcccaggtttcccctctaggtactacatgggaggatactgcgatgatatctgacaatattactggcttgaaaagatacagagatgatgatgatgtaaaaccatttcctccaggtttaaatccagctgaaactaagaatgaacagggaggccagactacttctgctcctttggctcatcagatgagtatgccaaatactacggccgaattggcagccattgagaagtttttgcagttctcagattctgttccgtgcaaaattcgtgctaaacgtggctgtgccactcacccaagaagcattgcagaaagggttagaagaactaaaataagcgagcgaatgaggaaactacaggatcttgtgccaaacatggataagcaaacaaacacatcagacatgttggacttggctgttgagtacattaaagacctacaaaaccaagttgagactctttcagacaatcgggctaagtgcacgtgttcacacaagcaacaacaataagggaaaagaattaaaggatgatgataagagagtcagagttttttgtacagattttgttgtaataatatggtctagaaattagagcagcttaattttcagatataataatatttatgatgttgtcactttttctatggttgtttgggaatggtggggaatgagatcataaaagttgacttttattataagatcatataatttgatgatgatgatgtatgtcacatgtcacatatgcaaagcattgtgtacaaaaatatgatgaagcaagtttatt

SEQ ID NO: 88 - protein, 151 aa, Medicago truncatula
MISDNITGLKRYRDDDDVKPFPPGLNPAETKNEQGGQTTSAPLAHQMSMPNTTAELAAIEKFLQFSDSVPCKIRAKRGCATHPRSIAERVRRTKISERMRKLQDLVPNMDKQTNTSDMLDLAVEYIKDLQNQVETLSDNRAKCTCSHKQQQ

SEQ ID NO: 89 - DNA, 1368 bp, Nicotiana benthamiana
gattatgtatccatcctcaacttcttcttcacctcaaaattcaatgagccatagcaccaccgctggcggcgatagccacgatggcggaggactgacccgttatggttcagctccgggctcgtttttaacgactgcagttcaatccgtcactggtgctactaatcacgattttaacctccacgggtcccaccatcaacaccttggaccttcgcgatattattcgccaaatttggcgtcatctaattcattaaattcggaatctactagtaaggctaaggaacaatcgagtttacagaggtcaattggtttcaatgatttaacaattggcggcggcagtggaagtgacggtggcggtggatgtggagttttgccggcggcgaattcgacgacgccgttgattcgacatagtagctcaccagctaggtttcttaatcaacttgctgctgctgctggtgatactgtatcaatgggaagaggaagctacaactctaaaggcatcgcagacagtagttgtggtataacaaggctgaactctcagctcagcttcactaggcaagaagctctctctcaaatagcagaggaaaatgaggatgttgaagggaccagtacagacaatggccacagaaagtcaacacattcttatgccactgcaagtagtttcgcaatgggttcttgggaagataacaattctataatgttctctgtcactccgagcaaacgagccaagcaaattagcaatgacattgtcaataatgggcttgatgacggggaaactcagttccagtttggcttgtctcagacagcactagaaatggcatcaatggatagatttctgcacatccctgaggattctgttccttgcaaaattcgtgccaagggtggttgtgctactcatcctcgcagcattgcagaaagggagagaagaaccagaataagcgggaagcttaagaagttacaagatcttgttccaaacatggacaagcaaacgagctacgctgacatgctggatctagcagtgcagcatattcgaacccttcaagatcaggttcagcatctcaatactgaacttgaaaactgcaaatgtggatgtaagaaatccagtcaataaccgtgcatataaaatgggaggaaccattagctgaagattgacctaatggctttctgtcaccattattgcctcgtagaagaattccaaatctgtacatatggaagcaaatttcctactagctttttaaagctaaaagtgaattctcttggtcgttttttccttctcagttggaccacatatatggttgtttggattatttctagtttttttctcctctaacatttgatttataattcagttttgggttcattttgctttct

SEQ ID NO: 90 - protein, 367 aa, Nicotiana benthamiana
MYPSSTSSSPQNSMSHSTTAGGDSHDGGGLTRYGSAPGSFLTTAVQSVTGATNHDFNLHGSHHQHLGPSRYYSPNLASSNSLNSESTSKAKEQSSLQRSIGFNDLTIGGGSGSDGGGGCGVLPAANSTTPLIRHSSSPARFLNQLAAAAGDTVSMGRGSYNSKGIADSSCGITRLNSQLSFTRQEALSQIAEENEDVEGTSTDNGHRKSTHSYATASSFAMGSWEDNNSIMFSVTPSKRAKQISNDIVNNGLDDGETQFQFGLSQTALEMASMDRFLHIPEDSVPCKIRAKGGCATHPRSIAERERRTRISGKLKKLQDLVPNMDKQTSYADMLDLAVQHIRTLQDQVQHLNTELENCKCGCKKSSQ

SEQ ID NO: 91 - DNA, 1464 bp, Nicotiana benthamiana
caattatgtatccatcctcaacttcttcttcatctcaaaattcaatgagccacagcaccaccgctggcggcggtagcaacggcggtggaggactgacccgttacggttcagctccgggcgcatttttaactactgcagttgaatccgtcattggtgctaataatcacgattttaacctccacgggtcccaccatcaacaccttggaccttcgcgatattattcgccaaatatggcgtcatctaattcgttaaattcggaatctactagtaaggctaaggaacaatcgagtttacagagatcaattggattcaatgatttaacaattggcggcggcggtggaagtggcggcagtggatgtggatttatgccggcggcgaattcgacaacgccgttggttcgacatagtagctcaccggctaagtttcttaatcaacttgctgctgttgctggtgatactggcttttcagcatcaatggggagaggaagctataactctaaaggcgtcgcagatagtagccggggtataacaaggctgaactctcagctcagcttcactaggcaagaagttctctctcaaatagcagaggaaaatgaggatgttgaagggaccagtacagaggatggctacagaaagtcaacacattcttatgccactgcaagtagtttcgcaatgggttcatgggaagataacaattctataatgttctctgtcacaccaagcaaacgagccaagcacattagcgatgacattgtcaatgggctcgatgatggggaaactcagtttcggtttggcttgtctcagacagcactagaaatggcgtcaatggatagattgctgcacatccctgaggattctgttccttgcaaaattcgtgccaagcgtggttgtgctactcatcctcgcagcattgcagaaagggagagaagaaccagaataagtgggaagctaaagaagttacaagatcttgttccaaacatggacaagcaaacgagctacgctgacatgctggatctagcagtgcagcacattcgaacccttcaagatcaggttcagaatctcaatactgaacttgaaaactgcaaatgtggatgtaagaaatcgagtcaataacagtgcaacaaaatgggaggaaccattagctgaagattgacctaaaggctttttgtcaccattattgcctctgtagaagaattcaaaatctgtacatatggaagcaaatttcctactagcttttttaaagctaaaagtgaattctcttggtcgtttttttccttttcagttggaccacgtatatgattttagataatttctagttttttccctctaacatttaatttgtaattcagttttgggttcattttgctttctagattattttcttgagtatcataaggctaattcatgctgatggactatagcttctctatttcattcccaatttaaagagaaaaattgatcctcc

SEQ ID NO: 92 - protein, 368 aa, Nicotiana benthamiana
MYPSSTSSSSQNSMSHSTTAGGGSNGGGGLTRYGSAPGAFLTTAVESVIGANNHDFNLHGSHHQHLGPSRYYSPNMASSNSLNSESTSKAKEQSSLQRSIGFNDLTIGGGGGSGGSGCGFMPAANSTTPLVRHSSSPAKFLNQLAAVAGDTGFSASMGRGSYNSKGVADSSRGITRLNSQLSFTRQEVLSQIAEENEDVEGTSTEDGYRKSTHSYATASSFAMGSWEDNNSIMFSVTPSKRAKHISDDIVNGLDDGETQFRFGLSQTALEMASMDRLLHIPEDSVPCKIRAKRGCATHPRSIAERERRTRISGKLKKLQDLVPNMDKQTSYADMLDLAVQHIRTLQDQVQNLNTELENCKCGCKKSSQ

SEQ ID NO: 93 - DNA, 1555 bp, Oryza sativa
tagccccaccacctccaccacctcacctcccccttcccttcccttcccctcttctctcctctactagctatagtataggccgcccccgtcgttttgttaattttcacgccgaaatttccacccacaccacgcgccgcctgcctacctgcgcctgcgcgagctgcagatcgatcgacgagaggccgcgtctcggtcgcggggggtggagttgatcgatcgatccaaggaggggtatgatgaggaggtttctgccggtggggggaggaggaggaggaggggtggagccgtcgtcgtcgtcgacgacgccgcagcgaggggaggcggaggcggcggggctgcggttcggtgggggggacatctcgctgggcccgcacggcggcggcggcggcggcggcggagggggcggagggcatgggcatcagctgcaggacgggagcgtggacttgctggcgcggcacagcagctcgccggccggattcttctccaacctcatggccagcaacggctttccaggctcaaaaggcgggggaggcagcggagccgaagcccaccaccacccttccatggccggcagcggcagcggcagcagcagcggcgggaggaagatgaagtcccagctgagcttcacggccgggccgccgcacctctcgcacatcgcggaggacggcgccttccccgaccgcgccggcgccgaggcctccgtgccccgcaccttctccgccggcggcagcagcggcggcggcgggttctccatcgtcgggccgtgggaggagtccagggacatcatctccaccctcggcgggtacgagtcccagttcggcggcatggcgagcacgtcggcgctggagatggccggcatggacaggtacctgcagctgcagcatgaccaggtgccgttcaaagtgcgggccaagcgcggctgcgcgacgcaccccaggagcatcgcggagagggaacggaggacgagaattagcgagaagctcaggaagctgcaggagctggtgcccaacatggacaagcaaacaagcacagcggacatgttggaccttgcagttgagcacatcaagggtctgcagagccagctgcaggctctgaagcatgagcaggagaagtgcacttgctgcagcaggccttgattgatgaagcagtgagacggcgaaactgaaaggtatctatccttagtttggaaccctgattacggatgatactttcatatttccttgagagtaacgcatgcgtggatgcatgaaccaattaatgtcagtgacacaatccaaatcgaccgtgagcattttgtcgaaatgtgtaaattgttagataggacatggcaagggacatgtatatgcatgcctgcatgcatgagtgagtgcatggagctagctactccgaaatagcggggtgcagccattgtgatcccttaattaattctcgatccactgatgattaattagcttgtaattctgtctttaaaccttttttttaatgacgaggggagagaaaaagaaaatgaaattttggtcagcatgcagaaagaactacattattaattcgtgcc

SEQ ID NO: 94 - protein, 300 aa, Oryza sativa
MMRRFLPVGGGGGGGVEPSSSSTTPQRGEAEAAGLRFGGGDISLGPHGGGGGGGGGGGGHGHQLQDGSVDLLARHSSSPAGFFSNLMASNGFPGSKGGGGSGAEAHHHPSMAGSGSGSSSGGRKMKSQLSFTAGPPHLSHIAEDGAFPDRAGAEASVPRTFSAGGSSGGGGFSIVGPWEESRDIISTLGGYESQFGGMASTSALEMAGMDRYLQLQHDQVPFKVRAKRGCATHPRSIAERERRTRISEKLRKLQELVPNMDKQTSTADMLDLAVEHIKGLQSQLQALKHEQEKCTCCSRP

SEQ ID NO: 95 - DNA, 1670 bp, Oryza sativa
agccgaagccgcaacctgcaaaaccaagtccacctccgcctccgcctccgcctccgcctccacccaccaccaccaccgccgccgccgcgccgccggagatgaacaggatgacggcgccgcacggggggatgccgccgccgccgatgccggcggcgggggggctggcgaggtacggctcggcgccggggtcgctgctggcgtcgatcgccgactcggtgatccggggccgcggggttggggttgtcgatcagctgcatcatcatcagcatcagcatcagcttccgccgccgccgccgccgcagcagcagcagatggtggggaggtacttctccgcggagtcgtcggggctcacctcctgcgagtccagctgccggacgacgacgacgacgtccacagcggcggcggccgatgtcgggcggcacccgctcgagcgcgcgtacggcggctccggcgagatccacgtcgacgcctcctccgccgccgtcccgctcttccgccacagcagctcccccgccggcctcctctcccgcctcatggctgacccgcacggcaatggcatggccgcgacgagagggatgggcggctactccggcggcggcggcgacgccggcgcgatggcgcacaggaggctgagctcgcagtggagcttctcgcggcaggacctgccgcagatatcggagatgggcggcctcatccccgacatcggggagagcatcgtcaccggcggcggcggcaacagctccagcgatggcgccggccacggcgcgcagtcctcctccttcctctcctccaggaacttctccatgagctcctgggacgacaccaactccatcatgttctcgcccccgagcagcagcaagaaggcccgcgtcgccgccgccgccgccggcgaccacggcgacgacatggtctccagcttcagcaacatcgactcccagtttggcttgtcgaagcagtcgtcgctggagatggccggcatggatgacttcttgcagctccagccagactccgtcgcctgcagggcccgggcaaagcgcggctgcgcgacgcacccgcggagcatcgctgagagggagaggagaacgaggattagcaagaggctgaagaagctgcaggatctcgtgccgaacatggacaagcaaacgaatacatcagacatgttggatattgctgtaacctacatcaaggagcttcagggccaagttgagaagctaaaacatgaccaagcaaactgcacttgctcaggcaagcacgattgctgaggctggagaaccagatctccgagctaatgttgtaatgatgtgattggtgaacccaaagttttgcttcagaagattagggtgtaaaagcacttcacatgtcaagtggcctccatgcctcgccctcccctttatcggttgtgttatggacagcgtcaatgacttgaagagtaggcggtgacaaagtagattaattgttgtattttaattgatgtaaggcagtggcttgtatgtaaaatcatccatttcaacgccaatgggattgcttcttattatcattgctcttattaaaagtatcctcctctttggcaccatttttgtgaattaccgactcattactgttgtttttgctgtaaatcaccttgtatgtctccttttcgtttttccaacaaacttattagttgttgtgtc

SEQ ID NO: 96 - protein, 369 aa, Oryza sativa
MNPAPSRAPQRQQRGGEMSARYGGGLQFFADAPPAGVEGGAATARTFFPVPGGGGEQQPPERAMRQQHYGGGGSGAAEISLGHGHGHGGKHHFHQFGVEAKDGGGGGDQSGFLTRHNSSPPGFFSSPVMDNGFSSSARPAGSSLGEVRHGAMSSSSNNNKKMKAPLSFASSRQGSGGLSQISEDGIPDLTDSIHGAAHHHGRSEENVSTHDHVVRSFSSGGFSIGSWEDSNSIVFSTSTGKSGAHGNDDIIATLSNYESQLVAPREMAGVEKYLQMQHDQVPFRVRAKRGCATHPRSIAERERRTRISEKLRKLQALVPNMDKQTSTSDMLDLAVDHIKGLQSQLQTLKEDKEKCTCSCKQASRNRPAD

SEQ ID NO: 97 - DNA, 1500 bp, Oryza sativa
atggctgcggcggcggcggcgggccagatctccctggacgacctccgcaacggcggcggggtcgccgccaatgccggcggcggcggcggcgtccacgacgacttcctcgaccagatgctcagcagcctgccgccctcggcgtggcccgacctcgccgccgggaaggcggccgaggacgacgccgaggggatgcatcaccaccaccaccagcagcagcagcagtttggtgggccgtacgacgagtcggcgatgctggcgtcgcggctccggcagcaccagatcagcggcggcggaggaggaggcggcggtggcgcggccgccgtgaagcagatggtgctgcagcagctcgccgatctgaggcaggggcaccacatgatgctccagggcttggggggacggtcgccggcggggggcggcggcggcggcggcgacgggggccttctcctcccgctcaccctcggcagcggcggatcgggcggcgacgtgcaggcgttgctcaaggccgccgcggccaattccgccggaggaggagacgccggcggcgtctacggcggcggattcgccggctcgctccatcaacagcagcaacatttccagccacatccacagacggcgccgacgattccgacgcagagcttcggcggcggcggcggcggaggaggaggaggaaccgcgtcaggcggcggggcggcgcagcctcaggccggcgcggctggaggaggcgcgccggcgccgccgcggcagcgggtgcgggcacggcgaggccaggccaccgacccccacagcatcgccgagcggcttcggagggagaggatcgccgagaggatgaaggcactgcaagaactggttcccaacgccaacaagttgatgcagacggacaaggcttccatgctggacgagatcatcgactacgtcaagttcctacaactccaagtcaaggcaagcacgtacactaaattactaatacatgttttgagcatgagccggttaggtggcgccgcagccgtcgcgccgctcgtggccgacatgtcctcggaggggcgaggcggcggcgcggcgaacggcggagcaccggcggcggcggggagcgatagcctgacggtgacggagcagcaggtggccaagctgatggaggaggacatgggcaccgccatgcagtacctgcaggggaagggcctctgcctcatgccgatctccctcgcgtccgccatctcctcggcgacgtgccatctccggccgccggtggtcgccgccgcgcagcagttcccggccgggctcggcgccgccgctgccgccgcgcaccaccaccaactgagcgcggcggcggcggcggcggccatgcgcggacacctgcccggcctgaacgccgacggctccgtgccggcctcgccgagcatgtcggtgctcacggcgcagtcggccatggccaacggcggcgggggcgccgccgacggcgaggggtcgcagctcaaggacgccgcctccgtctccaagccgtga

SEQ ID NO: 98 - protein, 399 aa, Oryza sativa
MYGSPVSKDLNLPVQPPAMSSSGLLRYRSAPSTLLAEFCDDFLPPAAAPRAASPDADNVFSRFLADHQIRDKSPPATAAAAAAAAHFPDDPTMATQHHHQQQMMFQHHPQQMASVEGLYRTVSSTGIDAATAAANAAGGGGGGLLRQSSSPAGFLNHLNMDNGYGSMLRAGMAAAGGGVGFRNGANAAAAADSPGGSGGRLKGQLSFSSRQGSLMSQISEMDSEELGGSSPEGAGGGGGGGGRGYLSGYPMSSGWEESSLMSDTNISGVKRQRDSSEPSQNGGGGGGLAHQFSLPKTSSEMAAIEKFLQFQDAVPCKIRAKRGCATHPRSIAERVRRTRISERIRKLQELVPNMDKQTNTADMLDLAVDYIKDLQKQVKGLNDSRANCTCSAKHQQYSG

SEQ ID NO: 99 - DNA, 2031 bp, Oryza sativa
gcatccccccgcaaaagcaatccgccgattaaactaacccaaaaaaaaaagaaaaaaaactactcctcctcctcgcccaaccccgcaaaagcagcggcgacctcgcgaagccaagccaccaccacttcttccttcgctcgctcgcgtattttcttttgcttttttgtgtgctcatttcctcgccgtaaagaagcgaggaggaggaagcgtagcttgagaggctggagagatcgatcgagagagcttagcaacagcagcaaagtgattggagttgagcttgtccgtcttgaaaagtcgctgatcttttcttgtttactttcttctttttatttctttcttgtgttgctgaattgaggttgtgtgggcggccatggcgaggaggcggagataggaggtgggtggttgttgttgttgtttgatttggtgggttgaggtgggagaattggagttttgttggagaagagaggagagaaggggatgtacggctcgccggtttccaaggatctgaacctcccggtgcagccgccggcgatgagctcgtcgggcttgctgcggtacagatcggcgccgagcacgctgctcgccgagttctgcgacgacttcctcccgcccgccgccgcgccccgcgccgccagccccgacgccgacaacgtcttctcccgcttcctcgccgaccaccagatccgtgacaagtctccccccgccaccgccgccgccgccgccgctgccgctcacttccccgacgaccccaccatggccacccagcaccaccaccagcagcagatgatgttccagcaccacccgcagcagatggcctctgtcgaggggctctaccgcaccgtcagctccaccgggattgacgccgccaccgccgccgccaacgccgccggtggcggcggcggcgggctgctccggcagagtagctcgcccgccggattcctcaatcatttgaacatggacaacgggtacgggagcatgctgcgggcgggcatggcggcagccggcggtggggtggggttcaggaacggcgcgaacgccgccgccgcggccgactcccccggcggcagcgggggcaggctgaaggggcagctcagcttctcgtcgcggcagggctcgctcatgtcgcagatctcggagatggacagcgaggagctcggtgggagcagccccgagggcgccggtggcggcggcggcggcggtggccggggttacctctccgggtacccgatgagctccgggtgggaggagtcgtcgctcatgtcggacacgaacatctccggcgtgaagcgccagcgcgactcgtcggagccgtcccagaacggcggcggcggcggcggcctggcgcaccagttcagcctgccgaagacctcgtcggagatggcggccatcgagaagttcctccagttccaggacgcggtgccctgcaagatccgcgccaagcgcggctgcgccacgcacccgcgcagcatcgccgagcgggtgaggaggacaaggatcagcgagcgaatcaggaagctgcaagaactcgtgccaaacatggacaagcaaaccaacactgctgacatgctggatttggctgttgactacatcaaggatcttcagaagcaggtcaagggattaaacgacagccgagctaactgcacctgctcagcgaagcatcagcagtactctggctagaaagctttgtacaagtcatggagacttcagaaaagaacacaagattgttttggagattaggcaggactgagacgatctctgaagatgtgtaatggttaatttcatttgtttgggggggtttaattagagaggcacatggaagaaaaggctcttgtgtgccaaagcactgtataagcaaagggcaatggagcagtggcatcatcaggattcaagtgataaaaagaaaaaggaaaaacaagggagaaaaagggtgggagatgggtgaaacaattgtatagttttcttgtaacttttgccatatatacccctgcatgccccatgtccagtgcattttcgatagaaatttattactgc

SEQ ID NO: 100 - protein, 401 aa, Oryza sativa
MYGAPVSKDLSLQPAGVRTPPQMSSPGLLRYRSAPSTLLGEVCGDFVLPGGGGGGGQLQLQLQQQRPGSPDHAADTVLARFLAGHGGHDNKPPRPAAHFAPPEDSMASHQQQLMYQSHQQQQQMASAMEGLYRTVSSGGTESTAAAAGNSLLRQSSSPAGFLNHLTMDNGYGNMLRAGMGGGGGGGDPRLKGQLSFSSRQGSVMSQISEMGSEDEELAGGGGSPEAGSNGGGAARGGYGGGYAMGSSAWEEPSPPATSLLPDSSLPSKRPRDDLPRQLSLPAASKNSSKPPSSASAAASPEMAAIEKFLQFQDAVPCKIRAKRGCATHPRSIAERVRRTRISERIRKLQELVPNMEKQTNTADMLDLAVDYIKELQKQVKVLNDSRSSCTCSASKQKHFAG

SEQ ID NO: 101 - DNA, 1875 bp, Physcomitrella patents
actcggtcttcgagatgatccgagcggtgtggtgagaagtacttcgaaatgggttccaagtagttggaaagcagtgtgcacgagtgaaagctatacctgtagtgttcccaagtgttgaacagtgacggttgctgatgtgggaggtgcgagcttcagttggttggtcggtcggtcggtcggtcggtcggtcagtcgatcagctgcactaggacttgtaggaaacctgaaggtgaatttatggctgggtaacgcagcacagatagtcgtcctagttggcgcgcgttttcaaaaaagtgactaaaagttcaaggtttgttgagaatgtgtggtaagagcgtggctgtcatggatggagccgcgagcaccatgatacagagccaccgaggcacttcccaagcgtcttattcttcaggaaggagtgctgtggatgaagagatctcggcgatgttgcacagtggaaattactcgcacattagtcaagcaccgcttgctgtgtccgtaggactagaacattttccttattctgtgtaccaaggttacccaggtaatcaaactcgacctgttccgacgacgcaacggaatacaaacatgcctcggggagaaataggcgacgggaatgcacatgttgggcctctactgcacagaggatctcctcctcggcattcaactttcaacttggaagagaaatacgtgttggaagctaaaagcgaagcgttggacgcaaacgtactgcggaatggtgctacttatggcacaatctatgagaattcgagaccatcggcgatgagcacgactgtgcccttgctgcaccgctaccattcagctcctgcaagcacgtatttgacccagatgaatgaggagcagatcggtaacaccgttatgtcttcgatttttacggatggagggctcacccccataacagaaaacatggacgttgagcgattgggctgcgggaactcaaactcgaacgaattcgagcattacttagccccagagaacgatttcagtcgccgggctgcgttttcggctcttcacagggaagaggcaacgcccgattcctttgcgaccacgttccagaattccaagaatgcggtgttatgtcaatcaagcttatcgtctgctgggttgtcgcaacccaatatatccatgcaagataggatggctgagaatggctcggaaaagaacagctctcgcaactcggacgataataatcacctgattagcggttacgcggcatcgatatattctcaagaggactgtcactggaaatcgcctacaagtccagccaagaggcaacggggactggacggcgagagtgaaacctcgagcggctcagtcgaaggctcgacgtatcggaaaagccaacaaggtggcttaatccgtcacatgagcttaccacactcaaccaacggagattctagtagcccaggagtggaggacaacaccttccacacggtccctatgcgcacccgtgcgaaacgaggatgcgccacacacccccgcagcatcgcagagcgcgtgcgcaggacgaagatcagcgagcggatgaagaagctccaggacttggttcccagcatggacaagcagaccaacacctccgacatgctagacgagaccgtggagtacgtgaaatcgctgcagcgacaggtgcaagagttgagcgacacggtggtgcggcttgaagccgccgcagcacaaaaaatcttttcagattttcagatccgtcaaaagtatcttgcaactcctaacccttacagtgtagatgtgacgcaagctgatgcaactgcccatcgtctttctggcaagcaacagattcaagttggtacagtgatgagtggcattcttgaccatgacaccatatcacatgatgtttaa

SEQ ID NO: 102 - protein, 95 aa, Physcomitrella patents
MGYDDLLDLYSPCKTRARRGYATHPRSIAERNRRSRISERMKKLQDLVPNMDKQTNTADMLDEAVEYVKHLQTQVKDLSETIVRLKNSIRAQTAS

SEQ ID NO: 103 - DNA, 246 bp, Physcomitrella patents
atgcgagctcgtgcgaaacgtggatgcgctacccaccccagaagcattgccgaacgtgtgcgtcggacacgaattagtgagcgcatgaagaaacttcaagaccttgtcccgaacatggagaagacgaccaacacatcagacatgcttgacgaaaccgtggagtatgtgaaatccctgcaaatgaaagtgaaggaattaacggagactattgcacagctgaaagctgccacacagatgagcccataa

SEQ ID NO: 104 - protein, 144 aa, Physcomitrella patents
MEPPLDWSRTNSFRTAARVGEAGPKLGGLIRHSSLPAPSRPFSGNVDFDDLFADPSAVPLKTIRANRGHATHPRSIAERVRRGKISERMKKLQDLVPSMDRQTNTADMLDDAVEYVKQLQQQVQELSKTVAELQQLQERLGRRD

SEQ ID NO: 105 - DNA, 715 bp, Physcomitrella patents
gcaagagcagctctcgtgattcagacgataacaaccacctcatcaacggttacacagcattgatatacactcaagaagattttacctggaagtcgcctacaagtccagccaagaggcaacggggtctagacggcgatagcgaaacatcaagtggctcagcagagggatcaacctaccgcaactgccaacacagcggcctagttcgtcacatgagcctgccctcaacaaacggcggtcccaacagccccggcctggaggataaccactacggcgccgtccccatgcgcactcgtgcgaagagaggctgcgccacgcatccccgcagcattgcagagcgcgtccgcagaaccaagatcagcgaacgcatgaagcggctccaggacctagtgcctaacatggacaagcagactaacacctccgacatgcttgacgagaccgtggaatacgtgaaatcgctccagcgaaaggtgcaggagctcagcgatactgtggcgcggcttaaggctgacgcctcgcagagagcaaaaaattcgaataataacaactcaagtaactagttcgacgatattcagtctagtctggatagatagccgtagcttacaaagatttcaccacaacgattcgacggtgtgattcaccgcgctcgaatcaatctcggagaagttcgagtgtaacatactgcagcaaggaagatacgttaaaccggacacgggtt

SEQ ID NO: 106 - protein, 216 aa, Physcomitrella patents
MRCYVNQAYCLLGCRNPNISMQDRMAENGSEKNSSRNSDDNNHLISGYAASIYSQEDCHWKSPTSPAKRQRGLDGESETSSGSVEGSTYRKSQQGGLIRHMSLPHSTNGDSSSPGVEDNTFHTVPMRTRAKRGCATHPRSIAERVRRTKISERMKKLQDLVPSMDKQTNTSDMLDETVEYVKSLQRQVQELSDTVVRLEAAAAQKVSNTSHSPEIA

SEQ ID NO: 107 - DNA, 708 bp, Physcomitrella patents
  misc_feature (699)..(699): n is a, c, g, or t
gtggactcaaagcggctatgtattcacaggacgatttgttgaacaacgatactgtgacttctatgccaacaagcccaggcactccagggggaaagaggcaacgagggtttgtgggagaaaacgagatatcgagtggctcggagttgaactccaaatcataccggctgaacaataaccagtccactggtcttatccgccacatgagcttgccaacatctggagatgtgccaaacatgagccttaacactgatgaccattacgtccagatgcgagctcgggccaagcgtggatgtgccacccaccccaggagcatagcggagcgcgtgaggcggactcgcatcagtgagcgaatgaagaaattgcaggacctggtgcccaatatggaaaagacgaccaacacggctgatatgctggacgaaactgtggagtatgtgaagtcgctgcaagtgaaagtttccgagctccaagagacgattgcgaagctcaaagctgctagcgccactcaaatcacgagctcatgagtgggacgactgatttctgcgtatttctcggcgttttgtaacatatcatgaattcgacgttaccattgaaatctgactcacattccaggtttgcgaaacttgtacagtcgatcggtattaagtttggagttcgttggtgccgtcccctccggttgtaaatgcacggattgttgggtgnaaagcaaac

SEQ ID NO: 108 - protein, 167 aa, Physcomitrella patents
MYSQDDLLNNDTVTSMPTSPGTPGGKRQRGFVGENEISSGSELNSKSYRLNNNQSTGLIRHMSLPTSGDVPNMSLNTDDHYVQMRARAKRGCATHPRSIAERVRRTRISERMKKLQDLVPNMEKTTNTADMLDETVEYVKSLQVKVSELQETIAKLKAASATQITSS

SEQ ID NO: 109 - DNA, 1574 bp, Pinus taeda
cggccgggaagtcaaatgaattttatgaggcagggtagttctacttcagggctttcctctcagctgagtgacatgggtttgccacactgtggataatcttaatatgcccgtgggctcttccgctgatagcttgggtgggagcagttcagatgatggtagtttaagcaatggcaatggagtccaacgttacatgtcaagcttccgggttggatcatgggatgatacagtgatagtttctgagggttttgcaggcatgcaagatggggcagccttttctgcgaggaagcgtgtaagagatctgaatgggaaaatgatgcctgctttgaatctagcagagtcacagaagggagagccaagtagtcatgttcccatgggattaaatcatcagttcagcctaaccaaatcaccttccgaaattgcaatggagaagctactccaggactcggttccttgcaagattcgagcaaagcgaggctgtgcaacacatccacgaagtatcgcagaaagggtccgaagaacacgcatcagtgaaaagatgagaaatttgcagcaacttgtgccaaacatggacaagcaaaccaacactgcagacatgttagatgaagcagttgattatatcaagttccttcagaaacaagttcaggaactttctgaaaatgagcccaaatgcaattgctcttgtaaaatgaatgcatcagaaactacttaaaaatctagcagacttggggagattaatggaatgtatgtatcttgaagccatgctttcaaggaattgaaggaaacaaccagcaaccctgttctaaatatgtcctctcaaagacatacacgaccccgttttcccttgtggaaagtaagagtctatccaatctttctcctgatcctgtaaaggtcagacaattgtgctgcaatgttggggtgtgcttgggttcttctatgtttttgttgagtacctaaaaaaaactggcccttcttttattttcctttgccagtttctttttcagaattcagacttcccaattattatggaatatcattcagtcttgtatggtttttcgcaaccatgccagaactttagtgatttggttgacgttggtttctctcaaccaaagaagcccgtttttgatgttttccagcatcattatgtaagagtgacatcaagtgtaagacttaggatgctgattgtagtcaacttgtcaggctgatttttctttttttggtggaactgatgttgtacatgcattcagtgtaattaagacataggggtggattttatgcagacttgagcaacgactatgctacttttcaaatttccaaggatcctcatccatctgaaaagcatggcagattgttcttgtaaactgtgaagtcacattcctgccaaagattggctcatgttagcgtctatgtgctgttaactcgacgtgtaaaattctggccatttgggcttctcgtgaatatggaaaaatcttttgaatcaagaagctcatgctttaccaagcaatatcatgctttgaacttactataataggatttatgattttatcttggttcagtaatgaaacaaactttcctgg

SEQ ID NO: 110 - protein, 201 aa, Pinus taeda
MPVGSSADSLGGSSSDDGSLSNGNGVQRYMSSFRVGSWDDTVIVSEGFAGMQDGAAFSARKRVRDLNGKMMPALNLAESQKGEPSSHVPMGLNHQFSLTKSPSEIAMEKLLQDSVPCKIRAKRGCATHPRSIAERVRRTRISEKMRNLQQLVPNMDKQTNTADMLDEAVDYIKFLQKQVQELSENEPKCNCSCKMNASETT

SEQ ID NO: 111 - DNA, 717 bp, Populus tremula
ccaggcaaggtacatgtctaggttctctagtgattcttgggacggtgtttctctgagtggtctcaagagacagagggatcacgacgggaacatgttttctggcctaaacacactggacaatcaggatggaaattctggaaaccgagcgactggtttgactcaccacttgagcttgcccaagactgtttcagaaatggctaccatcgagaagtttttggattttcaaggcaattctgtcccgtgtaagattcgagccaaaagaggtttcgctacccacccacgaagcatagcagagagggtaagaagaactcggattagtgaaagaatgagaaaattgcaagaacttttcccaaacatggacaagcaaacaaacacagcagatatgttagatttggcagttgagcacattaaagatctacagaaacaagctaagaccctcacggatacgaaagcgaagtgcacgtgttctagtaaacagaagcaatattcaagtccctcagcttgattctagtttctgtacagatagcactaggacaatggcaagacaaaaaacaagcacatagctacctagttttgatcttctgtaaaataataggtatcaggagacagtgagctttaagggtaatttgatatacacttttctctgtaatattttgtagtgctggtctcggcattctatcgacagcaatgccctttcaaaagatagatctacagctc

SEQ ID NO: 112 - protein, 163 aa, Populus tremula
MSRFSSDSWDGVSLSGLKRQRDHDGNMFSGLNTLDNQDGNSGNRATGLTHHLSLPKTVSEMATIEKFLDFQGNSVPCKIRAKRGFATHPRSIAERVRRTRISERMRKLQELFPNMDKQTNTADMLDLAVEHIKDLQKQAKTLTDTKAKCTCSSKQKQYSSPSA

SEQ ID NO: 113 - DNA, 803 bp, Populus tremula
gaaatcggagaagaatgtattggtgggagcagtccagaaggcgattttagcaagagaaagtacatgtataacttcaatagcgatacttggggtgatgcttcgagattgaaggataatgatgggaacatgttttctgccctgaacacacgggaaagtcaggttgggaattctggaaaccgcatgactggtttgactcatcacttgagcttgcctaagacttttgcagaaatggctatggcggagaagtttttggatttccaaggcaattttgttccgtttaagatccgagccaagagaggtttcgctactcacccacgaagcatagcagagagggtaagaagaactcggattagtgaaagaatgagaaaattgcaagaacttttcccagacatggataagcaaacaagcaccgcagataagctagatttgtcaattgagctcatcaaagacctccagaaacaagtcaagactctcacggatactaaagccaagtgcacgtgttcaagtaaacagaaataatattcaagtacccctgcttgattttgtttctgtacagatagccctaggaaaatgaaaaaaagagaaaaaaagacatagctccttagttatcttctgtaaaataatagggtatcggagattgtgaactcaaggataagtagatacacttttcactgtaatattctgtaccactgctgatctcattacacggtaccggaagcagtgccctttcatagctcatcttcggattgtattttcctgtttgtagcttttgatgtgttaagcaaggttgttattgcattgcc

SEQ ID NO: 114 - protein, 151 aa, Populus tremula
MYNFNSDTWGDASRLKDNDGNMFSALNTRESQVGNSGNRMTGLTHHLSLPKTFAEMAMAEKFLDFQGNFVPFKIRAKRGFATHPRSIAERVRRTRISERMRKLQELFPDMDKQTSTADKLDLSIELIKDLQKQVKTLTDTKAKCTCSSKQK

SEQ ID NO: 115 - DNA, 845 bp, Populus trichocarpa
gatttagagaattctaagcaagcaacaaagatgagtactagaaatggatctaatcttgctaggcaaaacagctctccagctggaattttgtccaaccatggcgttgataatggctttgctgtaatgagaaatgcgggtagcttcagagctggcaatggcacgaatggagaagctactccatcaactagtaggttaagaagtcacgtgaatttctcgtcagggcataggactttgcctcagattgctgaaattggagaagaatgtattggtgggagcagtccagaaggcgattttagcaagagaaagtacatgtataacttcaatagtgatacttggggtgatgcttcgagattgaaggataatgatgggaacatgttttctggcctgaacagacgggaaagtcaggttgggaattctggaaaccgcatgactggtttgactcatcacttgagcttgcctaagactgttgcagaaatggctacggccgagaagtttttggatttccaaggcaattttgttccgtgtaagattcgagccaagagaggtttcgctactcacccacgaagcatagcagagagggtaagaagaactcggattagtgaaagaatgagaaaattgcaagaacttttcccagacatggataagcaaacaagcaccgcagataagctagatttgtcaattgagctcatcaaagacctccagaaacaagttaagagtctcgcggatactaaagctaagtgcacgtgttcaagtaaacagaaataatattcaagtacctcagcttgattttgtttctgtacagattgcactaggaaaaagaaaaaaagaagaaaaagcatagctcc

SEQ ID NO: 116 - protein, 244 aa, Populus trichocarpa
MSTRNGSNLARQNSSPAGILSNHGVDNGFAVMRNAGSFRAGNGTNGEATPSTSRLRSHVNFSSGHRTLPQIAEIGEECIGGSSPEGDFSKRKYMYNFNSDTWGDASRLKDNDGNMFSGLNRRESQVGNSGNRMTGLTHHLSLPKTVAEMATAEKFLDFQGNFVPCKIRAKRGFATHPRSIAERVRRTRISERMRKLQELFPDMDKQTSTADKLDLSIELIKDLQKQVKSLADTKAKCTCSSKQK

SEQ ID NO: 117 - DNA, 1379 bp, Populus trichocarpa
tagaaacttaatcaagaaacaggggattcaatggagtcagatcttcaacaccagcatcattttcttcatggtcataaccagcaccaacaaattcatcagaaacaaatgaattctgggttgacaagatatcagtctgcaccaagttcatatttttcaagtaatttagacagagacttctgtgaagagtttctcaataggccaacaagccctgaaacagaacgaattttcgcgagatttttagccaattccggtggcaatacagagaatataccaggttcaaatctttgtgagattaagcaagattctccagtaaaagaatcagtctcacaaattaaccagcaaccccagatgatggcttcaatgaataatcatagtagtgatacaaggctgcatcaacatcaacatcagcagcaccaacatggcaattactctgcctcacagggtttttatcaaagtcgatcaaaacctccattaccagatcataatccaggttctggtatgaatcatagatcaacgaattcaacggggttggagaggatgccttccatgaagcctagcagtggaaacaatccgaatctagttcgacacagtagctcaccagcagggcttttctccaacataaatattgaatttgaaaatggctatgctgtattgagagatgtgggagatcttggagcaggtaatagagacacaacttattctgcagctggtaggccaccttcatcttcagggataaggagtacaattgctgaaatgggaaacaaaaacatgggagaaaatagcccagacagtggtggttttggtgaaactcctggcaataattatgattaccctattggatcatgggatgattcggctgtgatgtctactgggtcaaaaagataccttacagatgatgacagaacactttctggtctaaattcatcggaaactcagcagaatgaagaggcaggaaatcgccctccaatgttggctcatcacttgagcttgccaaaaacatcagcagagatgtctaccattgaaaactttttgcaatttcaagattctgttccttgtaagatcagagccaagcgtggttgtgccacccatccaagaagcattgctgagagggtgagaagaactagaattagtgaacgaatgaggaaactccaggaccttgtaccaaacatggacaagcaaacaaacacatcagacatgctggatttggctgttgactacattaaagaccttcaaagacaattcaaggcactttcagagaatcgtgcaagatgtacatgcttaaagaagcagcagccctagctgaaaaaaccaaagtaagaattggtttgtatgtatagaactaataagaatttgcaagacgagagataaaggcgatgcta

SEQ ID NO: 118 - protein, 422 aa, Populus trichocarpa
MESDLQHQHHFLHGHNQHQQIHQKQMNSGLTRYQSAPSSYFSSNLDRDFCEEFLNRPTSPETERIFARFLANSGGNTENIPGSNLCEIKQDSPVKESVSQINQQPQMMASMNNHSSDTRLHQHQHQQHQHGNYSASQGFYQSRSKPPLPDHNPGSGMNHRSTNSTGLERMPSMKPSSGNNPNLVRHSSSPAGLFSNINIEFENGYAVLRDVGDLGAGNRDTTYSAAGRPPSSSGIRSTIAEMGNKNMGENSPDSGGFGETPGNNYDYPIGSWDDSAVMSTGSKRYLTDDDRTLSGLNSSETQQNEEAGNRPPMLAHHLSLPKTSAEMSTIENFLQFQDSVPCKIRAKRGCATHPRSIAERVRRTRISERMRKLQDLVPNMDKQTNTSDMLDLAVDYIKDLQRQFKALSENRARCTCLKKQQP

SEQ ID NO: 119 - DNA, 1139 bp, Populus trichocarpa
tcgtgggaagaagcctgcgcagcacgcatcatgtatcaacaaccgtcgtcgtcttcttcttcaccgcaaaaatccaatctgccaagtgggctaacaaggtatggttcggccccgggttcttttttaacccgagcagttgattcagtcatcggggctgaccgtgaactctctggtcttggatcaactcccctcgtgggccgtcaacaacacttctctggggactcaccctcaatcacctcggagtcgacctgcaaagtcaactcatccagctgcgatcgaaaagcacccaaaagtggcggcggcggggggttgcagaggtcgtacggtttgaatgagatagcacatggtgctggatctttggtgcggcagaggagctcgcctgctggatttctaagccatctcgccactgaaaatggaggtttctcaattacaaggggaactggaggctataactctcgcaatggctctggtggtggcccctcaaggttgaagtctcaattgagcttcactagacaagactctctttctcagatatctgaagttagtgagaatgttgttgaaggcatcggctctgacaatggcagtcagaactccactcattcttattctgcggctagctttggtatggaatcttgggacactccaaattccattgtattttctggccatccctcgaaacaagctaggactggagatggagacatttatagctgtttcaatgcgttagaaactcagtttagcctgccccagacaagtcttgagatggcaacagtggagaagctgctacaaattcctgaagactctgttccttgcaaaatccgtgctaaacgtggttgtgccactcatcctagaagcattgctgaaagggagagaagaaccagaataagtgggaagctgaagacactacaagacctcgttcctaacatggataagcaaacaagttatgcagacatgttggagttggcagtgaagcatataaagggccttcaaaatgaagtggagaaactccacaaagaattggaaggttgtacttgtggatgcaaacaatcaaccccatgatattgccaacaaaggagatctaaatcgaccggcaaaatctatgctttttgaatgaaaatttttcacttcacggtaaggtt

SEQ ID NO: 120 - protein, 421 aa, Populus trichocarpa
MNLLYSSSFKYSDGELRKSQEFMDLNPYHYHQQQQQIQQNSGLMRYRSAPSSILESLVNGTSGHDGGGIESGDYRYLRSSSPEMDTMLARFMSSCNGSGDSSSQNLQEFGERPAIKQEGGDSEMVYQSLPGHNLVTDNSVSVGNSMDSAFNVMSSMALENSMQATKMSTANGSNLARQNSSPAGLFSDLGVDNGFVVMREGGSFRAGNGTNGEASPTNKLRRHVNFSSGQRMLPQIAEIGEECIGGRSPEGDVSEARYMSRFTSDSWDGASLSGLKRQRDNDGNMFSGLNTLDNQDGNSGNRVTGLTHHLSLPKTLSETATIEKFLDFQGNSVPCKIRAKRGFATHPRSIAERVRRTRISERMRKLQELFPNMDKQTNTADMLDLAVEHIKDLQKQVKTLTDTKAKCTCSSKQKHYSSPSA

SEQ ID NO: 121 - DNA, 1376 bp, Populus trichocarpa
ggtggcttgcagggatcctcaaaagaagacatgaatcttttgtacagttctagtttcaagtattcagatggagaattgagaaagagtcaagaattcatggatttaaatccctatcactaccatcaacaacaacaacaaatccagcaaaattctggtctgatgcgttatcgctctgcgccaagctcaatcctggagagccttgtgaatggtacaagtggccatgatggtggtggcatcgaaagcggggattatcggtatcttcgatcttcaagccctgaaatggataccatgttggcaaggtttatgtcatcatgtaatggttctggtgattccagttctcaaaatctgcaagaatttggagagagaccagcgataaagcaagaaggaggagattcggagatggtttatcaaagtttaccagggcataatttggttactgacaattcagtgagtgttgggaattctatggatagcgcattcaatgttatgagttcaatggctttagagaattctatgcaagcaactaagatgagtaccgcgaacggatctaatcttgctaggcaaaacagctctccagctggacttttctccgaccttggcgttgacaatggctttgttgtaatgagagaaggtggcagcttcagagctggaaatggtacgaatggagaagctagtccaactaataagttaagaaggcatgtgaacttctcatcagggcaaaggatgttgcctcagattgctgaaattggagaagaatgtattggtgggaggagtccagaaggcgatgttagcgaggcaaggtacatgtctaggttcactagtgattcttgggacggtgcttctctgagtggtcttaagagacagagggataatgatgggaacatgttttctggcctaaacacactggacaatcaggatggaaattctggaaaccgtgtgactggtttgactcaccacttgagcttgcccaagactctttcagaaacggctaccatcgagaagtttttggattttcaaggcaattctgtcccatgtaagattcgagccaaaagaggtttcgctacccacccacgaagcatagcagagagggtaagaagaactcggattagtgaaagaatgagaaaattgcaagaacttttcccgaacatggacaagcaaacaaacacggcagatatgttagatttggcagttgagcacattaaagatctacagaaacaagtaaagaccctcacggatactaaagcgaagtgcacgtgttctagtaaacagaagcactattcaagtccctcagcttgattttagtttctgtacagatagcactaggacaatggcaagacaaaaaacaagcacatagctacctagttttgatctactgt

SEQ ID NO: 122 - protein, 342 aa, Populus trichocarpa
MYQQPSSSSSSPQKSNLPSGLTRYGSAPGSFLTRAVDSVIGADRELSGLGSTPLVGRQQHFSGDSPSITSESTCKVNSSSCDRKAPKSGGGGGLQRSYGLNEIAHGAGSLVRQRSSPAGFLSHLATENGGFSITRGTGGYNSRNGSGGGPSRLKSQLSFTRQDSLSQISEVSENVVEGIGSDNGSQNSTHSYSAASFGMESWDTPNSIVFSGHPSKQARTGDGDIYSCFNALETQFSLPQTSLEMATVEKLLQIPEDSVPCKIRAKRGCATHPRSIAERERRTRISGKLKTLQDLVPNMDKQTSYADMLELAVKHIKGLQNEVEKLHKELEGCTCGCKQSTP

SEQ ID NO: 123 - DNA, 896 bp, Populus trichocarpa
aaagcctctaatacccgagtgaagaagcagatgcaaccaacacctgccggaagcagcaacactagtgctggtggcggtagcgctggtggcggtggaggtggagggattgctaggtttcgttcagcaccagccacatggatagaagcacttcttggagaagaagaagaggacccattaaagcaaagtcagaacttgactgagttacttacttcaaacacaccttcaagtagagattcagtgccttttaatgcttctagtgctgctgttgaaccgggtttgtttgaaccggttggtggttttcaaaggcaaaatagctctccaactgattttcttcggagttctgggatcggaagtgatcaagggtatttttctagttacggaaatgcttcaaattatgagtatatgacgccaaatatggatgtttcgccttctgataaaagagctagagaggttgagttgcaaaacccttctgcgagatatccacctcctccgtcgaaaggagagcaaactgggcctttaagggcatctagtttgatagaaatggagatggataagcttttggaggattcagtgccttgcagggttcgtgcgaagcgtggctgtgctacgcatcctcggagtattgcagagagggttcggagaactcgaatcagtgaccgcataaggaaacttcaggaacttgttccaaatatggataagcaaacaaacactgctgatatgttagacgaggctttagcgtatgttaagtttcttcaaaggcagattcaggaactcacggaacagcaaagaaaatgcaaatgcatagctaaagaataacagaggtaatatgcctgcccactgttttgtgtaattatcagattaatgagatttcatttaaggtccatcatagtatttct

SEQ ID NO: 124 - protein, 261 aa, Populus trichocarpa
MQPTPAGSSNTSAGGGSAGGGGGGGIARFRSAPATWIEALLGEEEEDPLKQSQNLTELLTSNTPSSRDSVPFNASSAAVEPGLFEPVGGFQRQNSSPTDFLRSSGIGSDQGYFSSYGNASNYEYMTPNMDVSPSDKRAREVELQNPSARYPPPPSKGEQTGPLRASSLIEMEMDKLLEDSVPCRVRAKRGCATHPRSIAERVRRTRISDRIRKLQELVPNMDKQTNTADMLDEALAYVKFLQRQIQELTEQQRKCKCIAKE

SEQ ID NO: 125 - DNA, 1166 bp, Populus trichocarpa
gagaaagagagtaaaacagagcatatgccaatggattcaagtagtaataacaactatcatcaacaaaatcaacccagttcagggttattgagatttcgctcagctccaagttcccttcttgcaagttttaatgacagcggagttgacaatgattctgttttgaattaccaagagtttgaggataaatctgcagcaagagtgagagaggaagctgttaactattcaaactttccgcggagttattcaggtttgcctcctcattatccaagacagggctcggccacaaattcttcagctatggatagttcatatggtttgattggttcaatctcaatgggtcatcatgagcaacttaaaagggttgatccaagtctagctaggcagaatagctctcctgctggactttttgggaacgtttctgttcaaaatggctatcctgggtggaatggtactaatggagaagcaaattcaagattgaagagtcaacttagcctctcatcaagagcaccttcttccttaggctttcggtcacagatttctgaaattgggagcgaaagcattgaggcaggcagccctagtgctgacagtcgatttcatagcagtcacgggtttccatatggttcttggaacaattcgcatttgtcagagaattttagcagcatgaaaagagatcaagaaaatggaaacctgttttctaataatgctcagaacggagagcttggaaatcgcactcatgtattcgcccatcacttgagtttaccaaagacttcagttgaaatggttgccatggaaaagttccttcatttgcaagattctgttccttgcaaaattagagcaaagcgtggttgtgccactcaccctcgaagtattgcagaaagagtaagaagaactcggatcagcgaaagaatgaggaaactacaagagcttgtcccaaacatggacaagcaaacaaacacagcagacatgctagatttggctgtagattacatcaaagaccttcagaagcagtacaagacactcagcgacaacagagccaactgcaagtgtttaagcaagcagaaaccagtgcaaaacaaaattgtttgaggtgcttctgtacagaaatccaaggggctttaggacctgttcttattgatcttcagtatcaaaagcaaaatatttttgtt

SEQ ID NO: 126 - protein, 353 aa, Populus trichocarpa
MPMDSSSNNNYHQQNQPSSGLLRFRSAPSSLLASFNDSGVDNDSVLNYQEFEDKSAARVREEAVNYSNFPRSYSGLPPHYPRQGSATNSSAMDSSYGLIGSISMGHHEQLKRVDPSLARQNSSPAGLFGNVSVQNGYPGWNGTNGEANSRLKSQLSLSSRAPSSLGFRSQISEIGSESIEAGSPSADSRFHSSHGFPYGSWNNSHLSENFSSMKRDQENGNLFSNNAQNGELGNRTHVFAHHLSLPKTSVEMVAMEKFLHLQDSVPCKIRAKRGCATHPRSIAERVRRTRISERMRKLQELVPNMDKQTNTADMLDLAVDYIKDLQKQYKTLSDNRANCKCLSKQKPVQNKIV

SEQ ID NO: 127 - DNA, 789 bp, Ricinus communis
gtgaaactcgcagcaataattatgtcacaggtttccccattggatcttgggatgatacagctgtgatgtctgctggtttaaaaagactgacagatgatgatagaacactttctggcctgaatgcatctgaaaatgagagtggagaagtgggaaatcatcctcctatgttggctcatcacttgagtttgccaaaaacttcagctgaattgtctgcaatcgagaagtatctgcaattgcaagattctgtgccttgcaagattcgagctaagcgtggatgtgccactcatccaaggagcattgccgagagggtaagaagaactcgaattagcgaacgcatgaggaaactacaagatcttgtaccgaacatggataagcaaacaaacacatcagacatgttggatttggctgttgactacattaaagaccttcagagacaggtcgagacactatcagagaatcgttcgaagtgtacgtgcgcaagcaagcagcaacagtcttagcagagaatatgcccaagtaggagtagataggtgtgtgggggtgagtggtggtcatagctggatccaatgaatgagtgactatctagttgggccccaatccattaagaaggtgaatgccgtgtcattgctgacttcactgggtcaccccaccgggtcgggcggagtctcataacactgcctcactccgcggctctgcctgcccctttatcgcactccagaggcaatttgcttttttgtccagtttacgtgctcaggagggtaccgatggttttacgattttgaccgataa

SEQ ID NO: 128 - protein, 144 aa, Ricinus communis
MSAGLKRLTDDDRTLSGLNASENESGEVGNHPPMLAHHLSLPKTSAELSAIEKYLQLQDSVPCKIRAKRGCATHPRSIAERVRRTRISERMRKLQDLVPNMDKQTNTSDMLDLAVDYIKDLQRQVETLSENRSKCTCASKQQQS

SEQ ID NO: 129 - DNA, 1504 bp, Sorghum bicolor
gtccctcccggccaccgcgcgcgtgcctcgtcgtcggcacgccggcgcgtgcaatcgatctactcccagccgcccaagttcgtggactgggtagtagtagcagctaggggttgtcggcaggcatccttatgaggcgcttcctgccggccggaggcggcggcggcggcggcggggagccgtcgtcttcctcctcctcgggcgggcaacaccagcacggcggcgggctcgcgggcgagagggcggcggcgggcctgcggtaccgaggaggcgacatctcgctggggcacgggcacgacgacggacatcgtcgtcatcagtaccacctcggcgccggcgacgcggcggataggcagaacgacgggtccatggacatgctggcgcggcacagcagctcgccggtcggcttcttctccaacctcgtcatggacaacgggtacccacgctcaaataaagccggagtcagtggtggcaggcgaaggtcaccgtgatccttcaacggccaacaacaatagtggaagtagcagcagcggccggaagatgaagccgtcgtcgtccgggttcaacttcgccggcgggacgcagcagcagggccagcagcagggcgccgccgggggccacctctcgcggatctccgaggacggctgcgccagcttcccggccggcggcctggtgggcgaccgcgctgcaggtggccgcggctctggcgagagcagcagcggtggtgctgccgcggcggcgcgctcgtactccggcgggttctccattgttgggccgtgggaagagtccagggacatcattaccaccctcggcgcatacgaccctcagtttagcggcgccatggcgggtacggcgctggagatggcgggcatggacaggtacatgcagctgcagcaggaccaggtgccgttcaaagtgcgcgccaagcgcgggtgcgccacgcaccccaggagcatcgccgagagggaaaggcggacgaggatcagcgagaagctcaggaagccccaggacctcgtgcccaacatggacaagcaaacgagcaccgcggacatgttggaccttgcagttgagcacatcaagggcctgcagagcgaactgcaggctctgaaacacgagcgggagaagtgcacctgctgccgaaagcgatagcgattcacaacagggagggcatagaacacagaaacgcgtccatctttaacggttactgctaccttcaatttccttgatgtgaggaattgtacatggatgaagccatctacatatcttgattgtcgagtccttgttgagagtcctaattttagtgattattagcacacaatgggagtgcattcggcgcggcccatggatggagcgtgcatatgcaattttgcgtgcatagctaccatttccaaagcagtgagatccacatatagtcatgcatggacatctagctaggcaggcagtgccaaaataggcaacccttctgttctgatactttggtttcttcggtttgttgatgttcaacttg

SEQ ID NO: 130 - protein, 202 aa, Sorghum bicolor
MKPSSSGFNFAGGTQQQGQQQGAAGGHLSRISEDGCASFPAGGLVGDRAAGGRGSGESSSGGAAAAARSYSGGFSIVGPWEESRDIITTLGAYDPQFSGAMAGTALEMAGMDRYMQLQQDQVPFKVRAKRGCATHPRSIAERERRTRISEKLRKPQDLVPNMDKQTSTADMLDLAVEHIKGLQSELQALKHEREKCTCCRKR

SEQ ID NO: 131 - DNA, 1630 bp, Solanum lycopersicum
gcttgctagctcatacgccatttttccttcttcttcttcttcgataaaattcgaaaaaattgaagctataattccaaaaaagatattattagaatcttgattatgtttagctcagagccaatatctagagaaatggataagttgaatagtttctttttttccggtggtggtgggggttcttcaagcttcaaaaatggtgaaggaatggagtctgagttctttaggagcaaagaaatgatgggttctgatttttttcagcaacagtcacagtttcagcagagtaattccggtgggttaacgaggtacaggtcagctccaagttcgtttttcgccggaattcttgacggagacgggaataattccggtgaaaatttcattaccggtgatgggtcttcgagttctgattcggattccatgttcaccgccttattgaacaataacgacaccaccaacaacaatggtactcgagatatgaatgatcaaaaccagaagaatcagcttcagtttggtacttctttgaaacaggagattggtgaggagattgaatttgggaatgaaaatggtgtacaaaatagatatgagaacggtggtgtttcttatagtgtaggggtgcaaatgcaaactagagcaaatttgagtaatggaaatggtgactctgatctcatcagacaaaacagttcacctgctggattcttcaatggatttatgagagaagttgggaatttcggagcaagtgttgggactaacagggaagcaagtacatcaactaatggtttcaacaatcatataagttactcaactaatcaatcatctacctcaaacttcatgcctagcattgctgagaatgaatcttggaacgacgcgtcgtttaattccttgaagagaaatagagatggtgatctgaaaatgttctctactaatttcaatggaatgactaatcagaatgacgaatcaagaaactacacttcttctggtttatctcatcatttaagcttgcctaagacatcttctgagatggctgccatagagaaatacctacagttccaacaagattcagtgccttgcaaaatacgtgctaaacgaggctgtgctacgcacccacgaagtattgcagaaaggatgagacgtactcggattagtgaaagaatgaaaaaactgcaagatcttttcccaaatatggacaagcaaacaaacacagctgatatgttagatttggcagttgattacattaaagaccttcagaaacaagtccagacactgaccgataaaaaggcgaaatgctcgtgtacaagtaagcagctgcaatattcaaatggaacaacatgaaatagtcttgtgtacagatagtaataggtgaagttagatggaaaaggagagtaaataaactctctttctaccctaatatgctggaaatatggttctactttgtttttattttgcaacaaggcaagtgtagttttcaatgtattattgagtttgattagatctaataacagtctagtgagtacaatctagatgtataggagcacatgattattgtattatgctgttgtttattggaatttaactatgttattagttgattcaaaactttataagacaaataatatcgattggaaagagtaattcc

SEQ ID NO: 132 - protein, 407 aa, Solanum lycopersicum
MFSSEPISREMDKLNSFFFSGGGGGSSSFKNGEGMESEFFRSKEMMGSDFFQQQSQFQQSNSGGLTRYRSAPSSFFAGILDGDGNNSGENFITGDGSSSSDSDSMFTALLNNNDTTNNNGTRDMNDQNQKNQLQFGTSLKQEIGEEIEFGNENGVQNRYENGGVSYSVGVQMQTRANLSNGNGDSDLIRQNSSPAGFFNGFMREVGNFGASVGTNREASTSTNGFNNHISYSTNQSSTSNFMPSIAENESWNDASFNSLKRNRDGDLKMFSTNFNGMTNQNDESRNYTSSGLSHHLSLPKTSSEMAAIEKYLQFQQDSVPCKIRAKRGCATHPRSIAERMRRTRISERMKKLQDLFPNMDKQTNTADMLDLAVDYIKDLQKQVQTLTDKKAKCSCTSKQLQYSNGTT

SEQ ID NO: 133 - DNA, 1191 bp, Solanum lycopersicum
aaacataaaaacaacaaaaaattcacctgaagagaaaaattaaagttaacttttgctagaaaaaatttcaccgatgcaacgtggaactaccggtgacgggggtggtggactttcccgtttccggtcagctccggcgacatggttagaagctctacttgaatccgacactgagaacgaagttattcttaacccttcttctcccattttacacactcccaataaaccaccacctcacccatcaactccgaagcttaagctggaaaccggcggagctactaggttcactggcgatccgggtctgtttgaatccggtggtagtagcaattttctcaggcagaatagttctccggcggagtttctttcacatatcagctctgatggttacttctcaaactatggaattccgtccagtttggactatctttctccatccgttgatgtttcgcagtccgctaagcgaacccgagacgatgattccgaaagttcccccagaaaattagtatcccagttgaaaggagagtcaagtgggcagttacatggttctggtgggtcactggatgctgaaatggagaatctcatggatgatttggtgccttgtaaggttcgagcaaagcgtggctgtgctacccatcctcgcagcatagcggagcgggttcgtcgaacgcgtataagtgacagaattaggaagcttcaggaactggtgccaaatatggacaagcaaaccaacacagccgacatgttggaagaagcagtcgaatacgtcaagtttctgcagaggcagattcaggaacttacggagcatcagaagaaatgcacgtgctcaatgaaagatcaataatgagaagaagagagctccactagagtatataggcaatagtttggttagttgcatgcagtttagaaatggtaattcactcctatatatcctattcttcttcatgtgtagatattaatggaaatttgcaagagctttgctactttagaatccagagtcagctttggcttttaattattaaatttaggttgtacacttttctggtgcagttgtatcatgttgtatatgtagtgtcaatttgcttaatagtcaaatttttgcagcagaaacacttccctttctgaagatgtaatcatgatttgcagatccgtcatgttaaaatcaatataaatcgttgcatcagtgtgaagtttaat

SEQ ID NO: 134 - protein, 254 aa, Solanum lycopersicum
MQRGTTGDGGGGLSRFRSAPATWLEALLESDTENEVILNPSSPILHTPNKPPPHPSTPKLKLETGGATRFTGDPGLFESGGSSNFLRQNSSPAEFLSHISSDGYFSNYGIPSSLDYLSPSVDVSQSAKRTRDDDSESSPRKLVSQLKGESSGQLHGSGGSLDAEMENLMDDLVPCKVRAKRGCATHPRSIAERVRRTRISDRIRKLQELVPNMDKQTNTADMLEEAVEYVKFLQRQIQELTEHQKKCTCSMKDQ

SEQ ID NO: 135 - DNA, 838 bp, Saccharum officinarum
ggccaagggtttccatggttcagggagattcattctattgtgtttccacccgccaccaagcaggattcccccaatggggcatcatagccggaatagtactcttattaattacagtttggtttccaaagaaaatgacgggcttattcaggtccagcaagaccaagttccattcagagtacaagccaagcgtggatgtgccccgcatccaaggagcatcccagagcgggagcgaagaacgaggatcagcgagaagctcaaaaagttgcaggcccttgtgcctaacatggacaagcaaactagcccagcggacatgctggatttagcagttgatcacatcagaggactccagagcgagatgcaggctctcaaggaagacaaggagaagtgcacctgccgcagcaattgtccaccagggagataacatatgctaaaaatgggttctcggcaacatacagaacggcattgcacattgtcagacagcatgcaaaaaatggctactgtagcctattggcttcagcagattggccgagatatttggtattcatcaaatctagtgtttagcttcaatgcaagctagctagctagaagtagctgttgtgttcatattgaaaagcagaagcgtattttatttcaagcaggagtaaggggggaatgaaaggcttaggctactctaagttttaagggcctattgcagtttcatgaatttccctggttctaataagttcttttttgagaagtactgtactaataagttcttactacctgctagccagtactagcgcctcatgagcataccgtagatgctagatatgatattgaaggattttttcccctccgt

SEQ ID NO: 136 - protein, 115 aa, Saccharum officinarum
MGHHSRNSTLINYSLVSKENDGLIQVQQDQVPFRVQAKRGCAPHPRSIPERERRTRISEKLKKLQALVPNMDKQTSPADMLDLAVDHIRGLQSEMQALKEDKEKCTCRSNCPPGR

SEQ ID NO: 137 - DNA, 638 bp, Saccharum officinarum
gccagtattagtaactcttatgaataccagttttggtgtcgcgaagaaaatggcgggcctactgcaggtgcagcaagaccaagttccattcagagtacgagccaagcgtggatgtgccacgcatccaaggagcatcgcagagcgggagcgaagaacgaggatcagcgagaagctcagaaagttgcaggcccttgtgcctaacatggacaagcaaactagcacagcggacatgctggatttagcagttgatcacatcagaggactccagagcgagctgcaggctctcaaggaagacaaggagaagtgcccctgccgcagcaatcgtcccccagggagataacatatgctaaaaatgggttttcggcaacatacagaacggcattgcacattgtcagacagcatgcaaaaaatggctactgtagcatattggcttcagcagattgggcgagatatttggtattcatcaaatctagtgtttagcttcaatgcaaactagctagctagaagtagctgttgtgttcatattgaaaagcagaagcgtattttatttcaagcaggagtaaggggggaatgaaaggctttaagggcctattgcagtttcatgaatttccctggttctaataagttcttttttgggg

SEQ ID NO: 138 - protein, 106 aa, Saccharum officinarum
MNTSFGVAKKMAGLLQVQQDQVPFRVRAKRGCATHPRSIAERERRTRISEKLRKLQALVPNMDKQTSTADMLDLAVDHIRGLQSELQALKEDKEKCPCRSNRPPGR

SEQ ID NO: 139 - DNA, 1047 bp, Solanum tuberosum
attgggccttaaaccattgaaggggccaaaccaagccggaataaaattttgtggttaaaggcccattataaaaagtgattgaacagttatcatggcaaggtttttcgacaaggctttcttgggaattgaatatccacgaaattgtgtgaactgaatggattttccctaaccaagttcccaggacggattgatgaaatcgccgggttccacttcctcccaataatgaaagtcccatctgaagaattcagagtactgaaggtcgagcttcgccctcccactctattgtctcatttgagtttacctcaaacatcaccggagttatccgccatggagaagctcttgcaagattcagtaccatgtaaagtcagagcaaagagaggctgtgccactcatcctcgtagcatcgccgaaagggtaagaagaacacgaataagcgaaagaatgaggaagctgcaagagcttgtccccaatatggacaagcaaacagacccggcggatatgttggactttgcagctgactacatcaaagaactagagacacaagtcaaggcactatcggaaacgcgttcaaagtgtacgtgctcgcatgaatagaagaccatattcaaaatgataaggtagggcaatgctgtgcacattgtagtgggataaaaaggattgacaatggaaatagcaaagcagataggtggattctttttggcactggaaaaagaagagaataggttgccatattttggtgtgtaaaaaagatagattcagattcatctgatgtaacattataacgtaaactgtacataaaatttccattgtccacttatgttctgtgaaaggaatataatgttaggactttatcagctgcttttgtggactactttagtatgagcctaagtggttaggtccttttattatgttgtgtaaatgtgtgtgttgccattcaaaagtccaaataactcttttctttttttagataaaaggaagtacttgggctaaaacagttgcaaagatacttttaacatgatgtgatattgtactatatgcacaattttt

SEQ ID NO: 140 - protein, 123 aa, Solanum tuberosum
MKVPSEEFRVLKVELRPPTLLSHLSLPQTSPELSAMEKLLQDSVPCKVRAKRGCATHPRSIAERVRRTRISERMRKLQELVPNMDKQTDPADMLDFAADYIKELETQVKALSETRSKCTCSHE

SEQ ID NO: 141 - DNA, 1386 bp, Solanum tuberosum
gcctcttaccccatcaccccacccacccacttctctctctattaagttctcaacctccaaatcttaacaatccaattcaaaacaattctcaaatgtatccatcatcaacatcttcttcatcacaaggttcaatgagccacaccagcaccacagctggcggcggcggtggtctcactcgctacggttcagctccgggatcatttttaactacagcagttgaatccgtcgttaacgcgaaggaacaatcgaatttacagaggtcaattggtttcaacgacttaacaatcggcggcggcggcggcggaggaggaggtttgtcgacgacttcaacgacgccgttggttcgacatagtagctcaccggcgaggtttcttaatcaacttgctactgctgcaggtgatactggattttcagtttcaatggggagaggaagctataactcaaaaggcggtggagatagtggccggggaataacaaggctgaactctcagctcagcttcactaggcaagaagctctctctcaaatagcagaggaaaatgaggatattgaagggaccagtatagccaatggccacagaaagtcaacacattcttatgccagtgcaagtagtttcgcaatgggttcttgggaagataacaactctataatgttctctgtcacacctagcaaacgagccaagcagattagcaatgacatggtcaatgggctcgatgatggggaaactcagtttcagtttggcttgtctcagacagcactagaaatggcatctatggatagattgctgcacatccccgaggattctgttccttgcaaaattcgtgccaagcgtggttgtgctactcatcctcgcagcattgcagaaagggaaagaagaaccagaattagtgggaaactaaagaagttacaagatcttgttccaaacatggacaagcaaacgagctacgctgacatgctggatctagcagtgcagcacattcgaacccttcaagatcaggttcagaatctgaatacagaacttgaaaactgcaaatgtggatgtaagaaatcaagtcaataacaaaatggaaggaagcactttagctgaagattgacttaaaaggatttttgtcaccattattttgcctcttagaaactcaaatttgtacataaggaagtaaatttcatactagttttttaaagctaaaaagtaaactctcttttttgttttttttttccttttccagttagaagactacgtatatgattgttttggattatttctagtttttttttccatctaacatttacatttttaatttagttttgagtttattttggttgaagatcataaagctaattgatgatgttgtacaacaactttctctatttcatttttatgtaaaatg

SEQ ID NO: 142 - protein, 321 aa, Solanum tuberosum
MYPSSTSSSSQGSMSHTSTTAGGGGGLTRYGSAPGSFLTTAVESVVNAKEQSNLQRSIGFNDLTIGGGGGGGGGLSTTSTTPLVRHSSSPARFLNQLATAAGDTGFSVSMGRGSYNSKGGGDSGRGITRLNSQLSFTRQEALSQIAEENEDIEGTSIANGHRKSTHSYASASSFAMGSWEDNNSIMFSVTPSKRAKQISNDMVNGLDDGETQFQFGLSQTALEMASMDRLLHIPEDSVPCKIRAKRGCATHPRSIAERERRTRISGKLKKLQDLVPNMDKQTSYADMLDLAVQHIRTLQDQVQNLNTELENCKCGCKKSSQ

SEQ ID NO: 143 - DNA, 1331 bp, Solanum tuberosum
cgtttttcgccggaatcttgacggggacgggaataattccggtgaagatggtcattaccggtgatgggtcttcgagttctgattcggattccatgttcaccgccttattgaacagtaacgacaccaccaacaacaatggtactcgagatctgaatgatcaaaaccagaagaatcagctgcagtttggttcttctttgaagcaggagattggtgaggagattgaatttgggaatgaaaatggtgtacaaaatagatatgagaatggtggtgtttcatatggtgtaggggtgcaaatgcaaactagagcaaattcgagtaatggaaatggtggctctaatctcatcagacaaaacagttcaccagctggattcttcaatggatttatgagagaagttgggaattttggagcaagtgtagggactaacaaggaagcaagtacatcaactaatggtttcagcaatcatataagttattcaactaatcaatcatctacctcaaacttcatgcctagcattgctgagaatgaatcttggaacgactcgtcgttcaattctttgaagagaagtagagatggtgatctgaaaatgttctctaatagtttcagtggaatgactaatcagaatgacgaatcaagaaactacacttcttctggtttaactcatcatttaagcttgcctaagacatcttctgagatggctgccatagaaaaatacctacagtttcaacaagattcagtgccttgcaaaatacgtgctaaacgaggctgtgctacgcacccacgaagtattgcagaaaggatgagacgtactcggattagtgaaagaatgaaaaaactgcaagatcttttcccaaatatggacaagcaaacaaacacagctgatatgttagatttggcagttgattacattaaagaccttcagaaacaagtccagacactgaacgataaaaaggcgaaatgctcgtgtacaagtaagcagctgcaatattcaaatggaacaacatgaaattttcgtctgtacagatagtaataggtgaagttagatgggaagatggaaaaggagagtaaatgaactctctttctgccctaatatgctggaaatatggtttacttgtttttatttagcaataagacaagtgtagttttcaatgtattattgagtttgagtagatctaataacagtctagtgggtacaatctagatgtataggagcacatgattattgtattatgctgttgtttattggaatttaactatgttgttagttgattcaaaactttaaaagacagaaaatatcgattgaaaagagtacataattggcaattactctgtt

SEQ ID NO: 144 - protein, 318 aa, Solanum tuberosum
MVITGDGSSSSDSDSMFTALLNSNDTTNNNGTRDLNDQNQKNQLQFGSSLKQEIGEEIEFGNENGVQNRYENGGVSYGVGVQMQTRANSSNGNGGSNLIRQNSSPAGFFNGFMREVGNFGASVGTNKEASTSTNGFSNHISYSTNQSSTSNFMPSIAENESWNDSSFNSLKRSRDGDLKMFSNSFSGMTNQNDESRNYTSSGLTHHLSLPKTSSEMAAIEKYLQFQQDSVPCKIRAKRGCATHPRSIAERMRRTRISERMKKLQDLFPNMDKQTNTADMLDLAVDYIKDLQKQVQTLNDKKAKCSCTSKQLQYSNGTT

SEQ ID NO: 145 - DNA, 1155 bp, Solanum tuberosum
tagaaaaaaaaaaagttaacttttgctagaaaaaattcaccgatgcaacgtggaactgccggtgccggaggaggtggactttcccgtttccgttcagctccggcgacatggttagaagcactacttgagtccgacactgagaacgaagttattcttaacccttcttctcccattttacacactcccaaaaaaccaccacctcacccatcaactccgaagcttccggagcttaaactggaaactggcggagctactaggttcactggcgatccgggtctgtttgaatccggtggtagtagcaattttctcaggcagaacagttctccggcggagtttctttcacatataagctctgatggttacttctcaaactatggaattccgtccagtttggactatctttctccatccgttgatgtttcgcagtccgctaagcgaacccgagacggtgattccgaaagttcgcccagaaaattagcatcccagttgaagggagagtcaagtgggaagttacatggttctggtggatcgctggatgctgaaatggagaatctcatggatgatttggtgccttgtaaggttcgagcaaagcgtggctgtgctacccatcctcgcagcatagcggagcgggttcgtcgaacgcgtataagtgacagaattaggaagcttcaggaactggtgccaaatatggacaaacaaaccaacacagccgacatgttggaagaagcagtcgaatacgtgaagtttctgcagaggcagattcaggaacttacggagcatcagaagaaatgcacgtgctcaatgaaagatcaataatgagaagaagagagctccactagagtatataggcaatagttttgttagttgcatgcagtttagaaatggtaattcactcctctatatcctattcttcttcatgtgtagatattaatggaaatttgcaagagctttgctactttagaatccagaatcagcttcggcttttaattattaaatttaggttgtacacttttctggtgcagttgtatcatgttgtatatgtagtgtcaatttgcttaatagtcatatttctgcagcagaaacacttcactttctgaagatgtaatcatgatttgcagacctgtcatgttgaaactcaataaatatcgttgcatc

SEQ ID NO: 146 - protein, 257 aa, Solanum tuberosum
MQRGTAGAGGGGLSRFRSAPATWLEALLESDTENEVILNPSSPILHTPKKPPPHPSTPKLPELKLETGGATRFTGDPGLFESGGSSNFLRQNSSPAEFLSHISSDGYFSNYGIPSSLDYLSPSVDVSQSAKRTRDGDSESSPRKLASQLKGESSGKLHGSGGSLDAEMENLMDDLVPCKVRAKRGCATHPRSIAERVRRTRISDRIRKLQELVPNMDKQTNTADMLEEAVEYVKFLQRQIQELTEHQKKCTCSMKDQ

SEQ ID NO: 147 - DNA, 877 bp, Solanum tuberosum
ggtcgactccgaaaagtttcaagactcaagttggattctcatccgggaaacctcctgcttctcccaggctaatggctccaatctctgaatttagagataaagtcttggaagaaaagagcacggggaatgaacataaaaacgatgagaactgcattacagatttccccatgccttcttgggaagattcacacattttgtccgacgatttcctcaaagctgaagacattgagattgagccatactctaatgaagatgcatcccataatcagaatagtgaagggctggctcgcccgccaattcccttatctcatcatttgagtttgcccacaagtatcatggagaagctcttgcaagattcagtacacttgaatgtcagagcaaagaggggttgtgcaactcaccctcgtagcattgcagaaagggtgagaagaacacgaataagcgacagaatgaggaagctgcaagagcttgttcccaacatggacaagcaaacaaacacagcagatatgttggattttgcagtagattatattaaagagctggagaaacaagtcaagatattagcagaaatgcgctccaaatgtacgtgcataaataagtaaaaagctacagatcaaaaggtgaaagtaggatgaaagggaaatgataaattgaaatcagctagcagaagtggattccctttgatacttgaagaagacaatggggatggcattttggtgggtagaatatatagaagcaaattcatttgatataacataatatacttttttataaaaatgatgttcgaatcaaacttgtgcccacctcaattactagtgatttgcttgtatgaataattatgtccactacaacctcaaatgtacatatacttttgtct

SEQ ID NO: 148 - protein, 176 aa, Solanum tuberosum
MAPISEFRDKVLEEKSTGNEHKNDENCITDFPMPSWEDSHILSDDFLKAEDIEIEPYSNEDASHNQNSEGLARPPIPLSHHLSLPTSIMEKLLQDSVHLNVRAKRGCATHPRSIAERVRRTRISDRMRKLQELVPNMDKQTNTADMLDFAVDYIKELEKQVKILAEMRSKCTCINK

SEQ ID NO: 149 - DNA, 1056 bp, Triticum aestivum
  misc_feature (1053)..(1053): n is a, c, g, or t
gaggggacgacggagcggaatgctggcccggcacagcagctcgccggcggggttcttctccaacctcatggtggatgacggatatcatggctcgagaggcgccggagtagctggtggcagcagcggcggagaagcccaccgtcacgccagtagcagcacgaagatgaagtcccagctgagcttcacggccggcggacaacagaccactgcccacctctcgcgtatctccgagggcgcctccttattccccagcgccgacgccgtccgcgctgccgcgcactcgggcagcgagcaccccgtgtcgcgttccttctcggccagcggcagtagcgggggcttctccatcgtagggccgtgggatgagtcgagggagatcatcggcaccctcgatctcggcggttacgagtctcagttcagtggcatggcgagctcgtcgtcgctggagctggcggggatggacaagtacatgcaggcgcagcagcagcaggaccaggtggcgttcaaggtgcgggccaagcgcggctgcgcgacgcacccgaggagcatcgccgagagggagcggaggacgaggatcagctacaagctcaggaagctgcaggacctagtgcccaacatggacaagcaaacgagcacctcggacatgttggacctcgcggtggagcacatcaagggcctccagagccagctgcaggccatgaagcacgagcaggacaaatgcacctgctgcaacaagccttgagcaattaagcagaggaccaaggactgatcagcacaacgcaaagaatgacaccacccttactcgagagaaatgtacatgcatgcatgggtaatactattgatccaacatgatgcatgaattagtgcatgccaatgctaaatgagtacatggagctcaacggttcatactttattcaaggcggcaaggaactggcagccgttctgatggacccttcaacttgttcccagtctttggccataattatcttgaagcaggtggctagtagatcaggtacctctcccgtttccacgagaacatgaattttggtactaatnatg

SEQ ID NO: 150 - protein, 239 aa, Triticum aestivum
MLARHSSSPAGFFSNLMVDDGYHGSRGAGVAGGSSGGEAHRHASSSTKMKSQLSFTAGGQQTTAHLSRISEGASLFPSADAVRAAAHSGSEHPVSRSFSASGSSGGFSIVGPWDESREIIGTLDLGGYESQFSGMASSSSLELAGMDKYMQAQQQQDQVAFKVRAKRGCATHPRSIAERERRTRISYKLRKLQDLVPNMDKQTSTSDMLDLAVEHIKGLQSQLQAMKHEQDKCTCCNKP

SEQ ID NO: 151 - DNA, 873 bp, Taraxacum officinale
gcgggcacagcacagatgatttatcaaaaccaccagcaatccgatcataatcataactcgactgtctctggctctacctccgcattggtcaacccgctagcgacgatgaatcctccaatgaatcttcttcgtcagagtagctcaccagctggattcttcgaacacattaatatggacaatggttactctacgatgagatccatggacaaatttcgaactgctaacggcagtgtcccggattcagcaaagagatttgaaaaccaaatagctttcttatcaggtttacattcatcttctagaccactgtctcttatccccgaacacgagcccaaaaccatgagaataagcggtgcacataacaacgcaggtttcaatcaaaatcttccgaaaactaccggttacgttcccacctttccccatggtacttcttgggatgaacgagcaatgttaactgacgatttcatgaaagaactaggagaaaccgatcaaataaattcatctgaaaaccagaacgatgaagggagaattcatgtttccactggtttgactcatcagatgagtttgccaacgggttcctctgagttatccgtcatggaaaaactaatgcagttacaagacagtgtccctttaagaagcagggctaaaaggggctgtgctacccatccacgaagcatagcagaaagggtaagaagaacacgaataagtgaaagaatgaggaagctacaagaacttgtccccaatatggacaagcaaacaaacacagcagacatgttggatttggctgtcgactacatcaaagaacttcaaaaacaagttgagaagctttcagatcatcatgcaaagtgtacatgtctacataagggggaaatgtga

SEQ ID NO: 152 - protein, 285 aa, Taraxacum officinale
MIYQNHQQSDHNHNSTVSGSTSALVNPLATMNPPMNLLRQSSSPAGFFEHINMDNGYSTMRSMDKFRTANGSVPDSAKRFENQIAFLSGLHSSSRPLSLIPEHEPKTMRISGAHNNAGFNQNLPKTTGYVPTFPHGTSWDERAMLTDDFMKELGETDQINSSENQNDEGRIHVSTGLTHQMSLPTGSSELSVMEKLMQLQDSVPLRSRAKRGCATHPRSIAERVRRTRISERMRKLQELVPNMDKQTNTADMLDLAVDYIKELQKQVEKLSDHHAKCTCLHKGEM

SEQ ID NO: 153 - DNA, 546 bp, Vitis vinifera
atgttcgacggcgccggtgcgcaagggtttctccggcagagcagcttgccgacggagttcctctcccagatcaattcgtcggagggctatttttcgagctttgggattccagcagggttcgactacgcggcgtcgccggcagtggatggctctccgacagggaagcgggcgagggagttggaatcgcgaagttcgtctaggaaattttcatctcagtcgaaaggggagcagagttctcgattaaccggtagcgtggcaagcttactggatgtggacatggaaaagcttttagaggattcagtaccctgcagggttcgggccaagcggggttgtgctacacatcctcgcagcattgcagaaagagttcggaggacccgaatcagtgacagaataaggaaacttcaggaacttgtgcccaatatggataagcaaacaaacactgcagatatgctagaagaggcagtagagtatgtcaagtttctacaacaaaaaattcaggaactgtccgagcatcaaaaaaaatgcacatgcttagctagagaataa

SEQ ID NO: 154 - protein, 181 aa, Vitis vinifera
MFDGAGAQGFLRQSSLPTEFLSQINSSEGYFSSFGIPAGFDYAASPAVDGSPTGKRARELESRSSSRKFSSQSKGEQSSRLTGSVASLLDVDMEKLLEDSVPCRVRAKRGCATHPRSIAERVRRTRISDRIRKLQELVPNMDKQTNTADMLEEAVEYVKFLQQKIQELSEHQKKCTCLARE

SEQ ID NO: 155 - DNA, 1062 bp, Vitis vinifera
atgtatccttcttctgcttcctcctcttctcaccgttcactgcattcctccggccttattcgctacggttcagctccgggctccctcttgacctccgccgtcgattccctcgtctcaactgaccgtgaattctcccccctcggatctcaccatatcatgcctcaccagtacttttccggtgactcttcctccgagtccacctgtaaggtggctgcgccgccggatcacaaggaggccggagccggaggccccgctgctatgttgcagaggtcctacgggtttagtgagatgcctgtcgccggcttctctacagctagtagtttgaaaggcggtggtgaaggcggcggtggcggtggatctgcgccgtcgttgattcgccatagcagctcccctgctggcttcctcaaccagctcactgccgataacttgacaagggggactggaaactatagctctcaaggtggttgtaatggtggtcatggaatatcaaggttgaagtcccagttaagcttcaagaggcaagattctctttcccagatctcagaagtaagtgagaatatggttgatggcatcagctctgacaatggccacagaaatgccactcattcttatgccactgctagttttcctatggatgcctgggacaataccaacaccattgtgttttccacaacaccaaacaaacgagctaagaacatcaatggtgacattctcaacagtctcagttccttagagccacagtttagtctgccacagacaagtttagagatggcagcagtagagaagctgctgcaagtacctgaagactctgttccatgcaaagttcgagctaagcgtggctgtgccactcatcctagaagtattgctgaaagggagagaagaactagaataagcgggaaactgaagaaactgcaagatcttgttcctaacatggataagcaaactagctatgctgacatgttggacttggctgtgcaacatatcaaaggtcttcaaaatgaagtgcagaagctcaataaagaactggagaactgtacttgtggttgcaagcaagccctctaa

SEQ ID NO: 156 - protein, 353 aa, Vitis vinifera
MYPSSASSSSHRSLHSSGLIRYGSAPGSLLTSAVDSLVSTDREFSPLGSHHIMPHQYFSGDSSSESTCKVAAPPDHKEAGAGGPAAMLQRSYGFSEMPVAGFSTASSLKGGGEGGGGGGSAPSLIRHSSSPAGFLNQLTADNLTRGTGNYSSQGGCNGGHGISRLKSQLSFKRQDSLSQISEVSENMVDGISSDNGHRNATHSYATASFPMDAWDNTNTIVFSTTPNKRAKNINGDILNSLSSLEPQFSLPQTSLEMAAVEKLLQVPEDSVPCKVRAKRGCATHPRSIAERERRTRISGKLKKLQDLVPNMDKQTSYADMLDLAVQHIKGLQNEVQKLNKELENCTCGCKQAL

SEQ ID NO: 157 - DNA, 1185 bp, Vitis vinifera
atggccccagatgtctataatcatcagcaccacccccaccaaaactcaggcctaatgcggtaccagtctgcaccaagctcacttctggggagttttgttgatggcagctctgtccatcttcagtcttcaagccatgaaaccgaaaccatgttcgcgaggctcatgtcgggtagttcggattctcaaggcctgcagggtgttggagctatgaagcatgaagaagaggtgatggtggagggtgttccacagcagaatggatactctaatggctcccagatgatctacaacagccagccaatgcaaactatatccgttcataattcagcgagtccccggactaatatggaaagctcctttatgacttccatggccgctgagaattctatgaagattaggaatgaaaattgttccagtcttgttaggcagagcagctcccctcctggacttttccccaacttaacttctgaaaatggtatttgtttttcttcatttcttcattcatttttgtttcaaacttggttggtaatgggaaaccttagagcaggcaacagtactaatgtcgaagccaatccgtcggttagcagactgaacaatcaaataagcttctcatctgggttatcttcttgcaatggactactacctaaaatctccgaaatcagaaatgaaaacatagggctgcatagccccaaggatggcaataatagtaacagcagatgctacatttctaacttcacaacagattcctggagtgattctcccttcagtggtctgacaagaatggctgctgataatgatttgaagatgttttcgggtttaaacagtttggaagctcagaatgtggattcgcgatatcggtcccttggcttgactcaccatctgagcttgcctaaaaacttccctcagatcactactatagagaagtttctgcacttccaagactcggttccttgtaagattcgagcgaaaagaggatgtgccacccatcccagaagcatagcagagagagtgagaagaacccgaatcagcgaaagaatgaggaaactgcaggagctttttcccaacatggacaagcaaacaaacacagcagatatgctagatttggcagtagaatacatcaaagaccttcagaaacaggtcaagacacttaatgatactaaagtcaagtgcacatgttccagcatatga

SEQ ID NO: 158 - protein, 394 aa, Vitis vinifera
MAPDVYNHQHHPHQNSGLMRYQSAPSSLLGSFVDGSSVHLQSSSHETETMFARLMSGSSDSQGLQGVGAMKHEEEVMVEGVPQQNGYSNGSQMIYNSQPMQTISVHNSASPRTNMESSFMTSMAAENSMKIRNENCSSLVRQSSSPPGLFPNLTSENGICFSSFLHSFLFQTWLVMGNLRAGNSTNVEANPSVSRLNNQISFSSGLSSCNGLLPKISEIRNENIGLHSPKDGNNSNSRCYISNFTTDSWSDSPFSGLTRMAADNDLKMFSGLNSLEAQNVDSRYRSLGLTHHLSLPKNFPQITTIEKFLHFQDSVPCKIRAKRGCATHPRSIAERVRRTRISERMRKLQELFPNMDKQTNTADMLDLAVEYIKDLQKQVKTLNDTKVKCTCSSI

SEQ ID NO: 159 - DNA, 1101 bp, Vitis vinifera
atggccagtggcgggacagaagattcatcgtctcatactgttatgaatatgaggcagaattctcaggcaatggcgccagaatcagtggtagttgtgagccagcagaatcagtttatggcgtcgatgaagcacggagcggaggttcttcagcagcagcagaatggttatgcttctggttcgcagatgatgtatcagacttcatcacctatgccacatcataattcagcagctcctggtacagtggagaattcttacagtgcggtttcttcaatggggatggatcagtcgcagcagataaagattggtggaggcaacaattcgaatcttattcgacatagtagctcacctgcaggactgttctcccacctaaatgttgaaaatggctatgctataatgagaggcatgggaaatttcgggtctggaagtgggactaatggagaaccatctttttcttctgcaagcagattgaagggtcaaataaacttctcgtcagggccaccttcttcctcaggcctagtgactcccatctctgaaatggggaacaaaagcatgggaacaggtagtccagacaatggaagttttggtgaaggtcatagtaacagtggaggtttcatcacaggcttcccaataggctcttgggatgattctgcaatcatgtctgaaagttttagtagcttgaaaagtgttagagatgatgaggcaaagactttttctggtttgaatgcatctgaagctcagaagggcgagcctgcaaaccgccctcctgttttggctcatcacttgagtttgccaacaaagacttctgcagatttgacgaccattgaaaagtatttgcagttccaagattctgtaccttgtaagattcgagccaaacggggatgtgccactcatccacgaagcatcgctgagagggtgagaagaacccgaatcagcgaaaggatgaggaaactacaagagcttgtccctaacatggacaagcaaacaaacacatcagacatgttagatttggctgttgactatattaaagaccttcagaaacaggtcaagaccctctcagataatcgggcaaagtgtacgtgttcaaacaagcagaagccatag

SEQ ID NO: 160 - protein, 366 aa, Vitis vinifera
MASGGTEDSSSHTVMNMRQNSQAMAPESVVVVSQQNQFMASMKHGAEVLQQQQNGYASGSQMMYQTSSPMPHHNSAAPGTVENSYSAVSSMGMDQSQQIKIGGGNNSNLIRHSSSPAGLFSHLNVENGYAIMRGMGNFGSGSGTNGEPSFSSASRLKGQINFSSGPPSSSGLVTPISEMGNKSMGTGSPDNGSFGEGHSNSGGFITGFPIGSWDDSAIMSESFSSLKSVRDDEAKTFSGLNASEAQKGEPANRPPVLAHHLSLPTKTSADLTTIEKYLQFQDSVPCKIRAKRGCATHPRSIAERVRRTRISERMRKLQELVPNMDKQTNTSDMLDLAVDYIKDLQKQVKTLSDNRAKCTCSNKQKP

SEQ ID NO: 161 - DNA, 834 bp, Vitis vinifera
atgagttgtcagagtcagttgccgccgcagtatccgaggcaaagctcaagtacgagttcgtctgccatggatggctcatatggggttgtgaattccaacaacatggaagccaaacagggttcgagtcttgtcaggcaaagtagctctcctgctgggcttttctctcacctttcgggtcagaatggctatgccattatgagaggtgtgggaaactttagacctgggaatgttggtaatggagaaatcagcccatcaactagcaggttgaagcctcaagttagcttctcttctggattaccttcttccttgggactattgcctcagatctctgaaattggaagtgaccctggattcccatatggctcttggaatgattctgcccattttgagaacttcagtggcatgaaaagggaccaagacaatgatgggaagttgtattctggttcaaatacatctggtattcgggtatcattttgcatagtagatgtattttggactagtactattctccatacttcagctgagatggctgccatggagaagttccttcagttccaagactctgttccttgtaagattcgtgcaaagcggggttgtgctactcatccaagaagcatcgctgaaagggtaaggagaacccggatcagcgaaagaatgaggaaactacaagagcttgtcccaaacatggacaagcaaaccaacactgcagacatgttagatttggccgtggaatacattaaggaccttcagaaacagtacaatacacttactgataatcgtgcacactgcaagtgtttaggtaagcagaaaccggtcccaaatcaaactgtttga

SEQ ID NO: 162 - protein, 277 aa, Vitis vinifera
MSCQSQLPPQYPRQSSSTSSSAMDGSYGVVNSNNMEAKQGSSLVRQSSSPAGLFSHLSGQNGYAIMRGVGNFRPGNVGNGEISPSTSRLKPQVSFSSGLPSSLGLLPQISEIGSDPGFPYGSWNDSAHFENFSGMKRDQDNDGKLYSGSNTSGIRVSFCIVDVFWTSTILHTSAEMAAMEKFLQFQDSVPCKIRAKRGCATHPRSIAERVRRTRISERMRKLQELVPNMDKQTNTADMLDLAVEYIKDLQKQYNTLTDNRAHCKCLGKQKPVPNQTV

SEQ ID NO: 163 - DNA, 951 bp, Vitis vinifera
tattccttttaccttccggggttttctgtagtggttgttttattttggaacagagtggaaattttatcgggaaaatttgttggagggttgtgagggatgtataatgtttctcaagcttctccccatgacatgagtcttatgtactcctccaatttcaagcactctggagaagaagaaacggagaaaaccagagctgtattcatggattcaaatacgaattaccatcaccagcaaaaccagaatcaaccacccaactccggccttctgcggtttcgctcggcgccgagctcgcttctcgcgaatttcacggacagtggagatggtgttcacaagggagctaatctttgtgacgattttgaatcggagaggttcatgccgtgtgggggttttcaagattcggctatgagttgtgctactcatccaagaagcatcgctgaaagggtaaggagaacccggatcagcgaaagaatgaggaaactacaagagcttgtcccaaacatggacaagcaaaccaacactgcagacatgttagatttggccgtggaatacattaaggaccttcagaaacagtacaatacacttactgataatcgtgcacactgcaagtgtttaggtaagcagaaaccggtcccaaatcaaactgtttgacttgcttctgtacaggaaacgaggaaaaagatgaaaagtggatagaaaacagagctagcttctcttttttgcactaacaataaagagagaggacattttttttttcaagtgtgtgaagtagaaaggcagctagaatctctccacgggaaaatccagattctgtaagcaaaggaagcttccaactacatcataaagaagtaaaagtgataaattgtatactgtataggagacgtagcaataataatgtaagaacacgttccttgtgttgtatgtaatttatcctgttgtcttcaataaaatcta

SEQ ID NO: 164 - protein, 183 aa, Vitis vinifera
MYNVSQASPHDMSLMYSSNFKHSGEEETEKTRAVFMDSNTNYHHQQNQNQPPNSGLLRFRSAPSSLLANFTDSGDGVHKGANLCDDFESERFMPCGGFQDSAMSCATHPRSIAERVRRTRISERMRKLQELVPNMDKQTNTADMLDLAVEYIKDLQKQYNTLTDNRAHCKCLGKQKPVPNQTV

SEQ ID NO: 165 - DNA, 1139 bp, Zea mays
gggccacctctcgcggatctccgaggacggcgccttcccgggaggcatgatgggcgaccgcgcgggccgcggctctgctggcgagagcagcggtgccgccgccgcggcgcgctcgtactcggccggcgggttctccatcgttgggccgtgggaggagtccagggacatcattaccaccctcggcgcatacgaccctcagtttagcggcgccatggcgggtacggcgctagagatggcgggcatggacaggtacgtgcagctgcagcaggaccaggtgccgttcaaagtgcgcgccaagcgcgggtgcgctacgcaccccaggagcatcgccgagagggagaggaggacgaggatcagcgagaagctcaggaagctccaggacctcgtgcccaacatggacaagcaaacgagcaccgcggacatgtgggaccttgcagttgagcacatcaggggcctgcagagcgagctgcaggctctgaaacacgaacaggagaagtgtacctgctgccgaaagcgatagcgattcacgacggccgggggatcggaccaagagagcagaaacacgtacgtcgtctatcatatctgtagcggttcatagttgatacgtgcccttagcttcagtgtccttgatgagaggaatgtacatggatgaagacatgacagacagccatctaattttagttacaacaacatgtcggagtacctactgctccaccttttccgaagaccgaagcaacgaagacccacgacccacgtgagcagtacctagccagtagccagtgcagtgcagtgctaaaatgggcggccctcctggtctgatccgatgatccttggatttcttctgttcctgcttgatcttcaacttcaattttagatctcttttaggatctgaaaacagttttgctatttatttaaacaagctgcttaattttattttgatatttagtataattaatatttgttgactgacgtcagaagaagaggctcctacttttttttttcttttgtataaggtaaaagaaagggcttttaggcttttatacagatataaaggctttggtgatgtttttgtatatacttcttaaacttataattgtttcaataggcattataatagatctgtattatttcagaaaaaa

SEQ ID NO: 166 - protein, 157 aa, Zea mays
MMGDRAGRGSAGESSGAAAAARSYSAGGFSIVGPWEESRDIITTLGAYDPQFSGAMAGTALEMAGMDRYVQLQQDQVPFKVRAKRGCATHPRSIAERERRTRISEKLRKLQDLVPNMDKQTSTADMWDLAVEHIRGLQSELQALKHEQEKCTCCRKR

SEQ ID NO: 167 - DNA, 1736 bp, Zea mays
ctacaacacgcctccccagtcaacacagctcagctcagctcggctagcgagctcctcgctcggctctactagctagtgtgttgggacttgggagctaggcggggttgattgcgattgggggaggcgggagtaggtgatgtacggcgcgccgttgcccaaggacctgaacctgccagcagccctgccgcagccgaccaggacgccaccgcagcagcagatgggctccccgggactgctgcggtacaggtcagcgccgagcacgctgctcggcgaggtgatgtgtggtggtgatcaggacttccccgcggctggcggcgcagggcacggaccaccggaccacgccgccgcggacaacgtcctcgcgcgctttctcgccgggcaccactccgagacccgcgactgcaagcctccccgccccgccgccgccgctcacttcatggacgaagctgccgtcgcgtccatggccgcctcacagcagcagcagctcatgtaccagtcgcagcaggagcagcagatggccgccatggaggggctgtaccgcaacgtcagctccggcggcacggagcacggtgcagccgttggcgctggtaacaacagcctgatccgccagagcagctcccccgccggcttcctcaaccacttgaacatggacaacgggtacgggagcatgctccgggtgggcatgggcggcggcgggttcaggaacggcgtcagcgacgcgcggctcaaggggcagctgagcttctcgtcccggcaggggtcggtgatgtcgcagatctcggaggtgggcagcgaggagctcgacggaggcggcggcagcggcagccccgaggcggccggcagcaacgccagcggcgcggcgcgtgggtacagcggcatcccggggtacccgatgggcggcctcgcgtccggcgcctggccggacgaggcgtcgccgtcgccgacgtccggcgcgaagcgcccccgcgactccggccccgcgctgcagcagccgctggcgccgcagctcagcctgcccagcggaaagaacaagggcggcagggcggcctcggcggagatggcggcgatcgagaagttcctccagttccaggacgccgtcccctgcaagatccgcgccaagcgcgggtgcgccacccacccgcgcagcatcgccgagcgggtgaggaggacgaagatcagcgagcggatacggaagctgcaggagctcgtgcccaacatggaaaagcaaaccaacactgccgacatgctggatctggccgtggactacatcaaggatcttcagaagcaggtcaaggtactgaacgacggccgcgccagctgcacctgctccgccggcgagctgcagggccagttcacccgttaaaaaggagccgcgccacctttttctcaggggggccagttcagctcgcatagttgcgttacgttacatggtgaggactgatcgaggaggtatatattggaattgagacgatagtagctagtctgtacatgcaacaagttcattagcaggcagagtaggcctcgcatgttagtgatagctgcgtcagttaatgtacgtttagattgcacatgtattcatcttgatttacatgtgttagagtagtttagtgtggattttagtttaaatttcacattaatccacttcaacatacattaaccgatgtgggtatatatgaccatctaattagaatctttatatacacatgtatttactcaatccacatgattagcctgtc

SEQ ID NO: 168 - protein, 408 aa, Zea mays
MYGAPLPKDLNLPAALPQPTRTPPQQQMGSPGLLRYRSAPSTLLGEVMCGGDQDFPAAGGAGHGPPDHAAADNVLARFLAGHHSETRDCKPPRPAAAAHFMDEAAVASMAASQQQQLMYQSQQEQQMAAMEGLYRNVSSGGTEHGAAVGAGNNSLIRQSSSPAGFLNHLNMDNGYGSMLRVGMGGGGFRNGVSDARLKGQLSFSSRQGSVMSQISEVGSEELDGGGGSGSPEAAGSNASGAARGYSGIPGYPMGGLASGAWPDEASPSPTSGAKRPRDSGPALQQPLAPQLSLPSGKNKGGRAASAEMAAIEKFLQFQDAVPCKIRAKRGCATHPRSIAERVRRTKISERIRKLQELVPNMEKQTNTADMLDLAVDYIKDLQKQVKVLNDGRASCTCSAGELQGQFTR

SEQ ID NO: 169 - DNA, 905 bp, Zea mays
cttctccagccccgtcatggataacggttttccaagtgatagggttgaagttggtggtgaggttcaccatgcaatgagggactatcacaagaagatgaagtcccccctgaacttgtccaaacaaggagccctctctcaattatgtgagcatggattatcggatggtctcaccaataatgtgcatggaactggacactccaaagagaacatcaccaccaacaacgtggcacgtcccttcacaagtgggttctcaattggatcatgggaggattcaaattctattgcgttttccaacccagcaaacaaatcgggaatacacaataatgatgacatcatagacaatattagtaactcttatgaactacagtttggtgtggcgaaggaaatggcgggcctactacagatacaacaagaccgggttccattcagagtacgagcaaagcgtggatgtgccacacatcctaggagcatcgcagagcgagagcgaagaacgaggatcagcgagaagctcaggaagttgcaggcccttgtgcctaacatggacaagcaaactagcacagcggacatgctggatttagcagttgaccacatcagaggactccagaacgagctgcaggtatatgctctcaaggaagacaaggagaagtgcagctgccgcggcaatcgtccagcggggagataacgcacgtacgtaggctaaaaacaatgggttctcggcaacacattatagaacggcattgcagacattgttgtcagacagcagcagcatcagaaggtggctgctgtggcatatatattggcttcagcagaccggtcgagatatttcatattcgttaaaaacctagtgttttagcttgttcgtttcactttaatttatatcggtctctactaaaaaaaaaaaaaaa

SEQ ID NO: 170 - protein, 221 aa, Zea mays
MDNGFPSDRVEVGGEVHHAMRDYHKKMKSPLNLSKQGALSQLCEHGLSDGLTNNVHGTGHSKENITTNNVARPFTSGFSIGSWEDSNSIAFSNPANKSGIHNNDDIIDNISNSYELQFGVAKEMAGLLQIQQDRVPFRVRAKRGCATHPRSIAERERRTRISEKLRKLQALVPNMDKQTSTADMLDLAVDHIRGLQNELQVYALKEDKEKCSCRGNRPAGR

SEQ ID NO: 171 - DNA, 1958 bp, Zea mays
gagggaaagtgaagcaggagggtggaccactgcgcgcgtgcggcgccttcctcctcgaatcaccgccgacagcttctgcagctagcgttatcacccccaccaccccggggctcggattaggtacgctgttcatgccgtctccacggccaaggaccggggaggagcttctttctctagctgggggatgagcaacaccaagtgatgttccatcatgtttgcttaaaaagacacgcactgcctctgcctgtgcctgcctgttcatggtcctcatcctcacagagctggttaccgaaaaattggtatactttttcttggcgcaggatctgagctgaagctgccaggccaggcgatcgagccgatgtacggctcgccggtgtccaaggacctcaacctcccggcgcagccgccgccgatggcctcgtccgggctgctacgctacagatcggcgcccagcgcggtgctcggcggcctctgcgaggaccagctccagctccctgccgccgctccgagcgccgccgacaacgtcttctcaaggttcctgcccgaccaccacatccgggacgacaagccgtcgcctgcccacttcccgagtgcggccgacatggcctcccaccaccagcaggagcaaatgatgttccactcccagtcccagtcccagcaccagcaggagacgggtaggtccgggggcggcctctaccgcaccgtcagctctggcatggaagcgggcggcactggcgtcggcgccgccagcagcctgattcggcagagcagctcccccgccgggttcctggaccatttcggcatggacaacgggtacggggcgatgctgagggcgagcatgggcatggggttccaggacggtggtgccagtgactccctcgcgggcggcggcggcggtagcggcaggctcgggggccagctgagcttctcgtcgcggcaggggtcgctcatgtcccagatctcggagatggacagccaggaggatgtcgtcggagcgagcagccccgacgctggcggcggcggggacgccgcctacatgccggggtacccgatgagctccggcgggtgggacgactcgtcgtcggcgctcttgccggacagcctgcccgcgacgaataaacgcccgcgggactcgttggagcacggcggcgggctggcgcaccagttcagcctccccaagacgtcgtcgtcggaggtggccgccatcgagaagttcctccagttccaggacgccgtgccctgcaaggtccgcgccaagcgcgggtgcgccacgcacccgcgcagcatcgccgagcgggtgaggaggacgaagatcagcgagcggatcaggaagctgcaggagctcgtgcccgacatggacaagcaaaccaacacctccgacatgctggacttggccgtcgactacatcaaggatctccagaagcaggtcaaggcgttgaacgagagccgcgccagctgcacctgcccggcgagcaagcaccagcagcggttctccggctgaagcaccggccgggccggcagtccccatcggtccccggcggctgcgtagcacgctccagtacacagctagtgcagcaaagatggacccaccacaaggcctggagacagacctgactgagaccgagatagagaggaacaccgccatcgtctgcagtgcatgcgcgcgagcagcatgtacagcgccggagcgatcgaggctcgctggactgctggatcgagcagtgtggcatcatcaagtattcaagcgactgggaggaaggaagaaagaatcgagtcatgggaccgaggaggaagaacgaatgaattgtacagtgctgtttctttttttttttttgctgtaaacacttttgctacatctgtgctgctgctgctctccatatgccgttgcccattgttactacgttaagaatcacagtgagatatagatcgaggaaaacttcactactgttaccaccacc

SEQ ID NO: 172 - protein, 380 aa, Zea mays
MYGSPVSKDLNLPAQPPPMASSGLLRYRSAPSAVLGGLCEDQLQLPAAAPSAADNVFSRFLPDHHIRDDKPSPAHFPSAADMASHHQQEQMMFHSQSQSQHQQETGRSGGGLYRTVSSGMEAGGTGVGAASSLIRQSSSPAGFLDHFGMDNGYGAMLRASMGMGFQDGGASDSLAGGGGGSGRLGGQLSFSSRQGSLMSQISEMDSQEDVVGASSPDAGGGGDAAYMPGYPMSSGGWDDSSSALLPDSLPATNKRPRDSLEHGGGLAHQFSLPKTSSSEVAAIEKFLQFQDAVPCKVRAKRGCATHPRSIAERVRRTKISERIRKLQELVPDMDKQTNTSDMLDLAVDYIKDLQKQVKALNESRASCTCPASKHQQRFSG

SEQ ID NO: 173 - DNA, 1392 bp, Zingiber officinale
ttctcctcccgccgcgagtcggcccctctctgtctctctctaccgcgcgcacggaggcgatgaaccattcgccgtctggcggagaccgtccggccgcgatggggcccccgccggggctcgctcgctacggctcggcccccgggtcgttcctcggcgggatcgccgactcggtcatcgccgccggcggatcggagaggatgatgacccggttctacgccggcgactcgccgtgcctgacctccgaatcgagctgctgggccccggacggcgacgccgccgcagccgccgccgctggaggttgctcgcgggggtcgtacggatccggggagctccaactctcttccgccaccggatccccgttggtccggcacagcagcttgcctacggggttcttctcccatctactggccgatcacgcaggtaattctagtacaaggatgattggaaactactctcaagcaggcacagaaagcatccatgtattggcacatagaaggcagcatgccccgtggggcttctcgcggcaagactccttgtcgcaaatttctgaattgagcatcccagaaatggaagagagtgacacgcaccatgattcagacgaggtagctgggaatgccggccagtcctacatttctagcaattttcaattaggctcatgggatgataaaaattcaattgctttttctgctccacaaagcaaaaggattaagtgcgataacggggatgcagttgcaagtctcggtaacattgattcacagtttagttttccaaggacatcatctgaaatgtctgagttagagaaataccttcagatccaacaagattcagtcccttgcagagcacgagctaagcgtggctgcgcaactcatccccggagcattgctgagagggaaaggagaacacgaattagcaaaaggctgcagaaattgcaagatcttgtgcctaacatggacaagcaaacgagcacctcagatatgctggaattggcaattcaacacatcaaagagctgcagggccaagtagagaagctcaaacaagaacaaacaaattgtacctgcactgcaaagcaggagaaggcttgagggcggccagtcactgtcattatagctactttgtctttttgttttttaaaacaaaaattgctataaacgatcatattgagttcattgaactagaatggatccatggcaagataaggagttgtacattgccatttccgttcatctgtatttgagttggcagccgtattccctccctgctaggttcatcaagccggccgacctaccggtcagctgtgccggagctgcttcatttctttccaaacattagtaaacattcaaatacttatcatgttttacatttcaaaatgcaaataattataataaagaaatg

SEQ ID NO: 174 - protein, 340 aa, Zingiber officinale
MNHSPSGGDRPAAMGPPPGLARYGSAPGSFLGGIADSVIAAGGSERMMTRFYAGDSPCLTSESSCWAPDGDAAAAAAAGGCSRGSYGSGELQLSSATGSPLVRHSSLPTGFFSHLLADHAGNSSTRMIGNYSQAGTESIHVLAHRRQHAPWGFSRQDSLSQISELSIPEMEESDTHHDSDEVAGNAGQSYISSNFQLGSWDDKNSIAFSAPQSKRIKCDNGDAVASLGNIDSQFSFPRTSSEMSELEKYLQIQQDSVPCRARAKRGCATHPRSIAERERRTRISKRLQKLQDLVPNMDKQTSTSDMLELAIQHIKELQGQVEKLKQEQTNCTCTAKQEKA

SEQ ID NO: 175 - DNA, 2228 bp, Zingiber officinale
gcacccttttaaaattgaagttcatggaagaaaattgaaacatagcctaaaaaaaaaacagttattagagaggacgagaaagagagatgtcaacatattttatacaaacttggaatgcaccccactatggagtcatgaattttgtttcagtagaaatcaatgaggaaggcatctcactcgagttctcacatgcaattattttcagggggagcagcatccataatccattaggcgtgtttgtttggcatggaatttgggggggtgtgttggctagaagttgaatggtctctctcgttgtcattgtccaggctaccattagcttcaccagcgtcttcttcgtcatcctgtgcgaaagatcctgctctcaagagttctttgaccttatggaattcgtcatagtgagctttccggtggtcgttgaaacttagccttggagcatctgcttcagaatcatcatcttcttccatggcatcagtttcttcttcagaagaggtccaatccccatttgagcttctgcttgaagaagctacatcattcaaagcagtagtgagcctcgtgccgaattcggcacgaggatttatttgttcacatcaaacctggatatgcagcaatgtaaatcaacactaaggccatgaaactttcattgtggtattaaaatccatttacaatgaaatctacttcttccccctctgattcttccacctctcattttccattcacatttctaaccgtacgcatacaacacaatctctacaaaagcagcttcacctcttgtgaagagtattcacaagttcatggacgaaccgcggcagaaataagtcttaggaagtggaggtggaggaggagaccggccgtgaaagaaaaaggtgggcgttgttttgtggttttggatcgaggatttgggataaagattggatttttggagtgtatagtgatgtatggatcgccgtcgatgccggcgtcgaaggatctaagctccattctgttcgccggaaaccaccctcaggagcacccgatgagctccggcggcctcctccgctaccgatcggctccgagctccctgctcggagaaatccgcgaggatttcctcccggtgagctcccccccgtgtcccgagacagcaacaagcgccgccatgttctgtagatttttagccgaggatatccagatccgcgacgacgtgccccccggacgaggtggcgcggccgcagcccagccgctcctccctcagttcactacgctggcgtcggcggagcggagtggagcacttttctcccctgcttcgcagcaaaatccaccagcagcagcagcagcagcagcagcagctcgcgagggtgatggagcaaactaagaacggcggcgccgccgcctccggctcatcaaatctcgtaaggcacagaagttcccccgccggagttctctcgcatctcaacgcgaatgctggatatccaaacatatcaaagaatcaaatcagcttctcttcaatccaaaacatctccgaggtcgtcatcgccgggagcagctccgacgacagcagcggatacataccgcgattcccgtcgagcaataattgggagaacttttcgcggagaaagagcacgatcgacgatactctcaatccaacagagctcgaggcgaggaatcacgcgccgactctgccccatcagttcagcttgccgccgaaaccctcgccggaaatggccgccgtggagaactacttgcacttccaggactcaggcccatttaagatccgagccaagcgaggttgcgcgactcatccccgaagcatagccgagagagtgaggagaacaagaatcagtgaaagaataaagaagctgcaggaactagtcccaaacatggatacgcaaaccaacactgcagacatgttaggtctggccatcagctacatcaaagatctccaagaacaagttcagacactttccgagagccggtcgagctgcacctgttcatctggcaagcagaagcaagatcatcatcatcatcatccatcagcttgagaagtagaaaaatagaaaagatccatgtagatatatctgtgtttttatgaagaatctgtaagtctttagatgtactgaagagtgttcttcctaaaccacattgtcaattccatgaactcgatgatgattacaagctaatattcgaccggcaagctgtaaaataataatggagaaaggaacttgtccccctcgtgccgaattcggcacgag

SEQ ID NO: 176 - protein, 226 aa, Zingiber officinale
MEQTKNGGAAASGSSNLVRHRSSPAGVLSHLNANAGYPNISKNQISFSSIQNISEVVIAGSSSDDSSGYIPRFPSSNNWENFSRRKSTIDDTLNPTELEARNHAPTLPHQFSLPPKPSPEMAAVENYLHFQDSGPFKIRAKRGCATHPRSIAERVRRTRISERIKKLQELVPNMDTQTNTADMLGLAISYIKDLQEQVQTLSESRSSCTCSSGKQKQDHHHHHPSA

SEQ ID NO: 177 - DNA, 924 bp, Zingiber officinale
gcaaagctcgctgatgtcgcagatatcggagatgggggacgaggaactgggcggaagcagtcccgacgagagtagccagcgttacgccgccggagttccgatgacatcttgggccgaagcctcgttgctcgccggcaacaatccgtcaggaccaggaaacagagaggaggaagggaaggtagtggaactgaggaactatgttgcaggtctcacacaccaactcagcttgccaaagcccgccgcagaaatggccgccatggaaaaactcatccagttccaggacgcatccccctgccggatcagagccaagcggggttgcgcaacgcacccccgaagcatcgcagagagggtgaggaggaccaaaatcagcgaaaggatgcggaaattgcaggaactggttcccaacatggacaagcaaaccaacacagcagacatgctggacttggccgtcgagtacattaaggatctccagagacaagtcgatgtcttaagggaaggccaagcaagctgcccctgctcgtctagcaagctgcagaagccttaccacaactcatgattgggggatatttacttttaagtttcaagtagttcttaataaggaatgcggagcagctgtatccaacgaagaagatggtggatgcagagccacccaccgtcgccgtcgtcatcgtcgtggtggtcaattggtcatcatcagcctcaccactcacggcggtcgatttgccctcgggatgccagcgagtttccttcgccagacggcagaagtgaatgggcactgcggcgacagcgaggagatcgattgaggcgtgaaagtgtcctgtcacatgagattagtttgcagaactgtggattgccgacaactacgtgcagcagcatcagcgatgctgctgctgatgatgatgatcaggaatataattcgattaa

SEQ ID NO: 178 - protein, 180 aa, Zingiber officinale
MSQISEMGDEELGGSSPDESSQRYAAGVPMTSWAEASLLAGNNPSGPGNREEEGKVVELRNYVAGLTHQLSLPKPAAEMAAMEKLIQFQDASPCRIRAKRGCATHPRSIAERVRRTKISERMRKLQELVPNMDKQTNTADMLDLAVEYIKDLQRQVDVLREGQASCPCSSSKLQKPYHNS

SEQ ID NO: 179 - DNA, 856 bp, Zingiber officinale
ggcacgagggaagaaggaagagtagttgatgcaccgaactcctcgaaggaacctcaaaaaagaacgtaactcctccgcggacaaccacagatgagatccggcctcgagcgtttccagtccgttccgagctcgtttcttggagaaatctgcggcgagttcctcgccgtccgtcccgagatagataccatgttccctcgattctctgccccaaatttcccggaaaacttctcttctggcggcggtcactcgcggccgccgactttgtcggagatcctcatcccccatcataaggttgcattcccctcttctccgctgacgatgtttcactcgaatgcagataatggctgcgctgcgataagttcgagcagtttcagaaacaaggagcttcctcccattagctgcccaccgaggcaaaactcccaaatgtctcagatctctgagactcagatgagcttgccgaagaacttcaaacagttccaggatgcagtaccatgcagggtccgagcaaaacggggtttcgctactcaccctcgaagtgttgctgaaagggtgaggaggagtaaaattagtgaaagaatgaaaaagctacaggaacttgtgcctaacatggataagcaaaccaacacggccgctatgctcgatttagcagtcatttatatcaaggatcttcagaaacaagtcaaggtgctatcggaggggcaggcgaagtgtacctgcttatctagcgagaagagcaagtacctgaagaatggagcgggtgaaggctaaagaattggagatgctggtaattgatgagcagagcaagaaacattgtctgtggctgtgtagctcctacccaattactggaatcagtaaa

SEQ ID NO: 180 - protein, 225 aa, Zingiber officinale
MRSGLERFQSVPSSFLGEICGEFLAVRPEIDTMFPRFSAPNFPENFSSGGGHSRPPTLSEILIPHHKVAFPSSPLTMFHSNADNGCAAISSSSFRNKELPPISCPPRQNSQMSQISETQMSLPKNFKQFQDAVPCRVRAKRGFATHPRSVAERVRRSKISERMKKLQELVPNMDKQTNTAAMLDLAVIYIKDLQKQVKVLSEGQAKCTCLSSEKSKYLKNGAGEG

SEQ ID NO: 181 - protein, 50 aa, Artificial sequence
  HLH domain of SEQ IS NO: 2
  UNSURE (34)..(34): Unknown amino acid
HPRSIAERVRRTRISDRIRRLQELVPNMDKQTNXTADMLEEAVEYVKALQ

SEQ ID NO: 182 - protein, 50 aa, Artificial sequence
  HLH domain of SEQ IS NO: 4
  UNSURE (34)..(34): Unknown amino acid
HPRSIAERVRRTRISDRIRKLQELVPNMDKQTNXTADMLEEAVEYVKVLQ

SEQ ID NO: 183 - protein, 50 aa, Artificial sequence
  HLH domain of SEQ IS NO: 6
  UNSURE (34)..(34): Unknown amino acid
HPRSIAERVRRTKISERMRKLQDLVPNMDTQTNXTADMLDLAVQYIKDLQ

SEQ ID NO: 184 - protein, 50 aa, Artificial sequence
  HLH domain of SEQ IS NO: 8
  UNSURE (34)..(34): Unknown amino acid
HPRSIAERERRTRISGKLKKLQDLVPNMDKQTSXYSDMLDLAVQHIKGLQ

SEQ ID NO: 185 - protein, 50 aa, Artificial sequence
  HLH domain of SEQ IS NO: 10
  UNSURE (34)..(34): Unknown amino acid
HPRSIAERERRTRISGKLKKLQELVPNMDKQTSXYADMLDLAVEHIKGLQ

SEQ ID NO: 186 - protein, 50 aa, Artificial sequence
  HLH domain of SEQ IS NO: 12
  UNSURE (34)..(34): Unknown amino acid
HPRSIAERVRRTRISERMRKLQELVPNMDKQTNXTSDMLDLAVDYIKDLQ

SEQ ID NO: 187 - protein, 50 aa, Artificial sequence; identical to SEQ ID NO: 185
  HLH domain of SEQ IS NO: 14
  UNSURE (34)..(34): Unknown amino acid

SEQ ID NO: 188 - protein, 50 aa, Artificial sequence; identical to SEQ ID NO: 181
  HLH domain of SEQ IS NO: 20
  UNSURE (34)..(34): Unknown amino acid

SEQ ID NO: 189 - protein, 50 aa, Artificial sequence
  HLH domain of SEQ IS NO: 22
  UNSURE (34)..(34): Unknown amino acid
HPRSIAERERRTRISGRLKKLQDLVPNMDKQTSXYSDMLDLAVQHIKGLQ

SEQ ID NO: 190 - protein, 50 aa, Artificial sequence
  HLH domain of SEQ IS NO: 24
  UNSURE (34)..(34): Unknown amino acid
HPRSIAERVRRTRISDRIRKLQDLVPNMDKQTNXTADMLEEAVEYVKFLQ

SEQ ID NO: 191 - protein, 50 aa, Artificial sequence
  HLH domain of SEQ IS NO: 26
  UNSURE (34)..(34): Unknown amino acid
HPRSIAERVRRTRISDRIRKLQELVPNMDKQTNXTADMLEEAVEYVKFLQ

SEQ ID NO: 192 - protein, 50 aa, Artificial sequence
  HLH domain of SEQ IS NO: 28
HPRSIAERVRRTRISERMRKLQELVPNSDKQTTNIADMLDEAVEYVKALQ

SEQ ID NO: 193 - protein, 50 aa, Artificial sequence
  HLH domain of SEQ IS NO: 30
  UNSURE (34)..(34): Unknown amino acid
HPRSIAERVRRTRISDRIRKLHDLVPNMDKQTNXTADMLEEAVEYVKFLQ

SEQ ID NO: 194 - protein, 50 aa, Artificial sequence
  HLH domain of SEQ IS NO: 32
  UNSURE (34)..(34): Unknown amino acid
HPRSIAERVRRTRISERMRKLQDLFPNMDKQTNXTAEMLDLAVEHIKDLQ

SEQ ID NO: 195 - protein, 50 aa, Artificial sequence
  HLH domain of SEQ IS NO: 34
  UNSURE (34)..(34): Unknown amino acid
HPRNIAERVRRTRISDRMKKLPELFPTMDKRTSXTADMLDMAVQYITDLQ

SEQ ID NO: 196 - protein, 50 aa, Artificial sequence
  HLH domain of SEQ IS NO: 36
  UNSURE (34)..(34): Unknown amino acid
HPRSIAERVRRTRISDRIRKLQELVPNMDKQSNXTADMLEEAVDYVKFLQ

SEQ ID NO: 197 - protein, 50 aa, Artificial sequence
  HLH domain of SEQ IS NO: 38
  UNSURE (34)..(34): Unknown amino acid
HPRSIAERVRRTRISERMRKLQDLVPNMDKQTNXTSDMLDLAVDYIKDLQ

SEQ ID NO: 198 - protein, 50 aa, Artificial sequence
  HLH domain of SEQ IS NO: 40
  UNSURE (34)..(34): Unknown amino acid
HPRSIAERERRTRISGKLKKLQELVPNMDKQTSXYADMLDLAVQHIKGLQ

SEQ ID NO: 199 - protein, 50 aa, Artificial sequence
  HLH domain of SEQ IS NO: 42
  UNSURE (34)..(34): Unknown amino acid
HPRSIAERERRTRISERIKKLQELFPNMDKQMNXIADMLDMALDYIKDLQ

SEQ ID NO: 200 - protein, 50 aa, Artificial sequence
  HLH domain of SEQ IS NO: 44
  UNSURE (34)..(34): Unknown amino acid
HPRSIAERVRRTKISERMRKLQDLVPNMDKQTNXTADMLDLAVEYIKDLQ

SEQ ID NO: 201 - protein, 50 aa, Artificial sequence
  HLH domain of SEQ IS NO: 46
  UNSURE (34)..(34): Unknown amino acid
HPRSIAERERRTRISGKLKKLQDLVPNMDKQTSXYADMLDLAVQHIKGLQ

SEQ ID NO: 202 - protein, 50 aa, Artificial sequence
  HLH domain of SEQ IS NO: 48
  UNSURE (34)..(34): Unknown amino acid
HPRSIAERVRRTRISDRIRKLQELVPNMDKQTNXTADMLDEAVAYVKFLQ

SEQ ID NO: 203 - protein, 50 aa, Artificial sequence
  HLH domain of SEQ IS NO: 50
  UNSURE (34)..(34): Unknown amino acid
HPRSIAERVRRTRISERIKKLQDLFPKSEKQTSXTADMLDLAVEYIKDLQ

SEQ ID NO: 204 - protein, 50 aa, Artificial sequence
  HLH domain of SEQ IS NO: 52
  UNSURE (34)..(34): Unknown amino acid
HPRSIAERERRTRISARIKKLQDLFPKSDKQTSXTADMLDLAVEYIKDLQ

SEQ ID NO: 205 - protein, 50 aa, Artificial sequence
  HLH domain of SEQ IS NO: 54
  UNSURE (34)..(34): Unknown amino acid
HPRSIAERVRRTRISDRIRKLQELVPNMDKQTNXPADMLEEAVEYVKYLQ

SEQ ID NO: 206 - protein, 50 aa, Artificial sequence
  HLH domain of SEQ IS NO: 56
  UNSURE (34)..(34): Unknown amino acid
HPRSIAERVRRTRISERIRKLQELVPTMDKQTSXTAEMLDLALDYIKDLQ

SEQ ID NO: 207 - protein, 50 aa, Artificial sequence
  HLH domain of SEQ IS NO: 58
  UNSURE (34)..(34): Unknown amino acid
HPRSIAERVRRTRISERMRKLQDLVPNMDKQTSXTADMLDLAVEYIKELQ

SEQ ID NO: 208 - protein, 50 aa, Artificial sequence
  HLH domain of SEQ IS NO: 60
  UNSURE (34)..(34): Unknown amino acid
HPPSIAERVRRTRISDRMKKLQELFPNMDKQTSXTADMLDMAVQYIKDLQ

SEQ ID NO: 209 - protein, 50 aa, Artificial sequence
  HLH domain of SEQ IS NO: 62
  UNSURE (34)..(34): Unknown amino acid
HPRSIAERVRRTRISDRIRKLQELVPNMDKQTNXTADMLDEAVEYVKFLQ

SEQ ID NO: 210 - protein, 50 aa, Artificial sequence
  HLH domain of SEQ IS NO: 64
  UNSURE (34)..(34): Unknown amino acid
HPRSIAERVRRTKISERIRKLQELVPNMEKQTNXTSDMLDLAVDYIKELQ

SEQ ID NO: 211 - protein, 50 aa, Artificial sequence
  HLH domain of SEQ IS NO: 66
  UNSURE (34)..(34): Unknown amino acid
HPRSIAERERRTRISEKLRKLQDLVPNMDKQTSXTSDMLDLAVEHIRGLQ

SEQ ID NO: 212 - protein, 50 aa, Artificial sequence
  HLH domain of SEQ IS NO: 68
  UNSURE (34)..(34): Unknown amino acid
HPRSIAERVRRTKISERMRKLQELVPNMDKQTNXTADMLDLAVDYIKDLE

SEQ ID NO: 213 - protein, 50 aa, Artificial sequence
  HLH domain of SEQ IS NO: 70
  UNSURE (34)..(34): Unknown amino acid
HPRSIAERNRRTRISERMKKLQELFPKMDKQTSXTADMLDWAVDHIKELQ

SEQ ID NO: 214 - protein, 50 aa, Artificial sequence; identical to SEQ ID NO: 191
  HLH domain of SEQ IS NO: 72
  UNSURE (34)..(34): Unknown amino acid

SEQ ID NO: 215 - protein, 50 aa, Artificial sequence
  HLH domain of SEQ IS NO: 74
  UNSURE (34)..(34): Unknown amino acid
HPRSIAERVRRTRISDRMRKLQELVPNMDKQTNXTADMLDLAVDYIKDLE

SEQ ID NO: 216 - protein, 50 aa, Artificial sequence
  HLH domain of SEQ IS NO: 76
  UNSURE (34)..(34): Unknown amino acid
HPRSIAERERRTRISGKLKKLQDLVPNMDKQTSXYSDMLDLAVQHIKSLQ

SEQ ID NO: 217 - protein, 50 aa, Artificial sequence; identical to SEQ ID NO: 191
  HLH domain of SEQ IS NO: 78
  UNSURE (34)..(34): Unknown amino acid

SEQ ID NO: 218 - protein, 50 aa, Artificial sequence; identical to SEQ ID NO: 191
  HLH domain of SEQ IS NO: 80
  UNSURE (34)..(34): Unknown amino acid

SEQ ID NO: 219 - protein, 50 aa, Artificial sequence
  HLH domain of SEQ IS NO: 82
  UNSURE (34)..(34): Unknown amino acid
HPRSLAERVRRTRISERMRKLQEIVPNIDKQTCXTSEMLDLAVEYIKDLQ

SEQ ID NO: 220 - protein, 50 aa, Artificial sequence; identical to SEQ ID NO: 184
  HLH domain of SEQ IS NO: 84
  UNSURE (34)..(34): Unknown amino acid

SEQ ID NO: 221 - protein, 50 aa, Artificial sequence
  HLH domain of SEQ IS NO: 86
  UNSURE (34)..(34): Unknown amino acid
HPRSIAERVRRTKISERMRKLQDLVPNMDKQTNXTSDMLDLAVEYIKDLQ

SEQ ID NO: 222 - protein, 50 aa, Artificial sequence
  HLH domain of SEQ IS NO: 88
  UNSURE (34)..(34): Unknown amino acid
HPRSIAERERRTRISGKLKKLQDLVPNMDKQTSXYADMLDLAVQHIRTLQ

SEQ ID NO: 223 - protein, 50 aa, Artificial sequence; identical to SEQ ID NO: 222
  HLH domain of SEQ IS NO: 90
  UNSURE (34)..(34): Unknown amino acid

SEQ ID NO: 224 - protein, 50 aa, Artificial sequence
  HLH domain of SEQ IS NO: 92
  UNSURE (34)..(34): Unknown amino acid
HPRSIAERERRTRISEKLRKLQELVPNMDKQTSXTADMLDLAVEHIKGLQ

SEQ ID NO: 225 - protein, 50 aa, Artificial sequence
  HLH domain of SEQ IS NO: 94
  UNSURE (34)..(34): Unknown amino acid
HPRSIAERERRTRISKRLKKLQDLVPNMDKQTNXTSDMLDIAVTYIKELQ

SEQ ID NO: 226 - protein, 50 aa, Artificial sequence
  HLH domain of SEQ IS NO: 96
  UNSURE (34)..(34): Unknown amino acid
HPRSIAERERRTRISEKLRKLQALVPNMDKQTSXTSDMLDLAVDHIKGLQ

SEQ ID NO: 227 - protein, 50 aa, Artificial sequence
  HLH domain of SEQ IS NO: 98
  UNSURE (34)..(34): Unknown amino acid
HPRSIAERVRRTRISERIRKLQELVPNMDKQTNXTADMLDLAVDYIKDLQ

SEQ ID NO: 228 - protein, 50 aa, Artificial sequence
  HLH domain of SEQ IS NO: 100
  UNSURE (34)..(34): Unknown amino acid
HPRSIAERVRRTRISERIRKLQELVPNMEKQTNXTADMLDLAVDYIKELQ

SEQ ID NO: 229 - protein, 50 aa, Artificial sequence
  HLH domain of SEQ IS NO: 102
  UNSURE (34)..(34): Unknown amino acid
HPRSIAERNRRSRISERMKKLQDLVPNMDKQTNXTADMLDEAVEYVKHLQ

SEQ ID NO: 230 - protein, 50 aa, Artificial sequence
  HLH domain of SEQ IS NO: 104
  UNSURE (34)..(34): Unknown amino acid
HPRSIAERVRRGKISERMKKLQDLVPSMDRQTNXTADMLDDAVEYVKQLQ

SEQ ID NO: 231 - protein, 50 aa, Artificial sequence
  HLH domain of SEQ IS NO: 106
  UNSURE (34)..(34): Unknown amino acid
HPRSIAERVRRTKISERMKKLQDLVPSMDKQTNXTSDMLDETVEYVKSLQ

SEQ ID NO: 232 - protein, 50 aa, Artificial sequence
  HLH domain of SEQ IS NO: 108
  UNSURE (34)..(34): Unknown amino acid
HPRSIAERVRRTRISERMKKLQDLVPNMEKTTNXTADMLDETVEYVKSLQ

SEQ ID NO: 233 - protein, 50 aa, Artificial sequence
  HLH domain of SEQ IS NO: 110
  UNSURE (34)..(34): Unknown amino acid
HPRSIAERVRRTRISEKMRNLQQLVPNMDKQTNXTADMLDEAVDYIKFLQ

SEQ ID NO: 234 - protein, 50 aa, Artificial sequence
  HLH domain of SEQ IS NO: 112
  UNSURE (34)..(34): Unknown amino acid
HPRSIAERVRRTRISERMRKLQELFPNMDKQTNXTADMLDLAVEHIKDLQ

SEQ ID NO: 235 - protein, 50 aa, Artificial sequence
  HLH domain of SEQ IS NO: 114
  UNSURE (34)..(34): Unknown amino acid
HPRSIAERVRRTRISERMRKLQELFPDMDKQTSXTADKLDLSIELIKDLQ

SEQ ID NO: 236 - protein, 50 aa, Artificial sequence; identical to SEQ ID NO: 235
  HLH domain of SEQ IS NO: 116
  UNSURE (34)..(34): Unknown amino acid

SEQ ID NO: 237 - protein, 50 aa, Artificial sequence; identical to SEQ ID NO: 197
  HLH domain of SEQ IS NO: 118
  UNSURE (34)..(34): Unknown amino acid

SEQ ID NO: 238 - protein, 50 aa, Artificial sequence; identical to SEQ ID NO: 234
  HLH domain of SEQ IS NO: 120
  UNSURE (34)..(34): Unknown amino acid

SEQ ID NO: 239 - protein, 50 aa, Artificial sequence
  HLH domain of SEQ IS NO: 122
  UNSURE (34)..(34): Unknown amino acid
HPRSIAERERRTRISGKLKTLQDLVPNMDKQTSXYADMLELAVKHIKGLQ

SEQ ID NO: 240 - protein, 50 aa, Artificial sequence
  HLH domain of SEQ IS NO: 124
  UNSURE (34)..(34): Unknown amino acid
HPRSIAERVRRTRISDRIRKLQELVPNMDKQTNXTADMLDEALAYVKFLQ

SEQ ID NO: 241 - protein, 50 aa, Artificial sequence
  HLH domain of SEQ IS NO: 126
  UNSURE (34)..(34): Unknown amino acid
HPRSIAERVRRTRISERMRKLQELVPNMDKQTNXTADMLDLAVDYIKDLQ

SEQ ID NO: 242 - protein, 50 aa, Artificial sequence; identical to SEQ ID NO: 197
  HLH domain of SEQ IS NO: 128
  UNSURE (34)..(34): Unknown amino acid

SEQ ID NO: 243 - protein, 50 aa, Artificial sequence
  HLH domain of SEQ IS NO: 130
  UNSURE (34)..(34): Unknown amino acid
HPRSIAERERRTRISEKLRKPQDLVPNMDKQTSXTADMLDLAVEHIKGLQ

SEQ ID NO: 244 - protein, 50 aa, Artificial sequence
  HLH domain of SEQ IS NO: 132
  UNSURE (34)..(34): Unknown amino acid
HPRSIAERMRRTRISERMKKLQDLFPNMDKQTNXTADMLDLAVDYIKDLQ

SEQ ID NO: 245 - protein, 50 aa, Artificial sequence; identical to SEQ ID NO: 191
  HLH domain of SEQ IS NO: 134
  UNSURE (34)..(34): Unknown amino acid

SEQ ID NO: 246 - protein, 50 aa, Artificial sequence
  HLH domain of SEQ IS NO: 136
  UNSURE (34)..(34): Unknown amino acid
HPRSIPERERRTRISEKLKKLQALVPNMDKQTSXPADMLDLAVDHIRGLQ

SEQ ID NO: 247 - protein, 50 aa, Artificial sequence
  HLH domain of SEQ IS NO: 138
  UNSURE (34)..(34): Unknown amino acid
HPRSIAERERRTRISEKLRKLQALVPNMDKQTSXTADMLDLAVDHIRGLQ

SEQ ID NO: 248 - protein, 50 aa, Artificial sequence
  HLH domain of SEQ IS NO: 140
  UNSURE (34)..(34): Unknown amino acid
HPRSIAERVRRTRISERMRKLQELVPNMDKQTDXPADMLDFAADYIKELE

SEQ ID NO: 249 - protein, 50 aa, Artificial sequence; identical to SEQ ID NO: 222
  HLH domain of SEQ IS NO: 142
  UNSURE (34)..(34): Unknown amino acid

SEQ ID NO: 250 - protein, 50 aa, Artificial sequence; identical to SEQ ID NO: 244
  HLH domain of SEQ IS NO: 144
  UNSURE (34)..(34): Unknown amino acid

SEQ ID NO: 251 - protein, 50 aa, Artificial sequence; identical to SEQ ID NO: 191
  HLH domain of SEQ IS NO: 146
  UNSURE (34)..(34): Unknown amino acid

SEQ ID NO: 252 - protein, 50 aa, Artificial sequence
  HLH domain of SEQ IS NO: 148
  UNSURE (34)..(34): Unknown amino acid
HPRSIAERVRRTRISDRMRKLQELVPNMDKQTNXTADMLDFAVDYIKELE

SEQ ID NO: 253 - protein, 50 aa, Artificial sequence
  HLH domain of SEQ IS NO: 150
  UNSURE (34)..(34): Unknown amino acid
HPRSIAERERRTRISYKLRKLQDLVPNMDKQTSXTSDMLDLAVEHIKGLQ

SEQ ID NO: 254 - protein, 50 aa, Artificial sequence
  HLH domain of SEQ IS NO: 152
  UNSURE (34)..(34): Unknown amino acid
HPRSIAERVRRTRISERMRKLQELVPNMDKQTNXTADMLDLAVDYIKELQ

SEQ ID NO: 255 - protein, 50 aa, Artificial sequence; identical to SEQ ID NO: 191
  HLH domain of SEQ IS NO: 154
  UNSURE (34)..(34): Unknown amino acid

SEQ ID NO: 256 - protein, 50 aa, Artificial sequence; identical to SEQ ID NO: 201
  HLH domain of SEQ IS NO: 156
  UNSURE (34)..(34): Unknown amino acid

SEQ ID NO: 257 - protein, 50 aa, Artificial sequence
  HLH domain of SEQ IS NO: 158
  UNSURE (34)..(34): Unknown amino acid
HPRSIAERVRRTRISERMRKLQELFPNMDKQTNXTADMLDLAVEYIKDLQ

SEQ ID NO: 258 - protein, 50 aa, Artificial sequence; identical to SEQ ID NO: 186
  HLH domain of SEQ IS NO: 160
  UNSURE (34)..(34): Unknown amino acid

SEQ ID NO: 259 - protein, 50 aa, Artificial sequence
  HLH domain of SEQ IS NO: 162
  UNSURE (34)..(34): Unknown amino acid
HPRSIAERVRRTRISERMRKLQELVPNMDKQTNXTADMLDLAVEYIKDLQ

SEQ ID NO: 260 - protein, 50 aa, Artificial sequence; identical to SEQ ID NO: 259
  HLH domain of SEQ IS NO: 164
  VARIANT (34)..(34): Unknown amino acid

SEQ ID NO: 261 - protein, 50 aa, Artificial sequence
  HLH domain of SEQ IS NO: 166
  UNSURE (34)..(34): Unknown amino acid
HPRSIAERVRRTKISERIRKLQELVPNMEKQTNXTADMLDLAVDYIKDLQ

SEQ ID NO: 262 - protein, 50 aa, Artificial sequence
  HLH domain of SEQ IS NO: 168
  UNSURE (34)..(34): Unknown amino acid
HPRSIAERERRTRISEKLRKLQDLVPNMDKQTSXTADMWDLAVEHIRGLQ

SEQ ID NO: 263 - protein, 50 aa, Artificial sequence; identical to SEQ ID NO: 247
  HLH domain of SEQ IS NO: 170
  UNSURE (34)..(34): Unknown amino acid

SEQ ID NO: 264 - protein, 50 aa, Artificial sequence
  HLH domain of SEQ IS NO: 172
  UNSURE (34)..(34): Unknown amino acid
HPRSIAERVRRTKISERIRKLQELVPDMDKQTNXTSDMLDLAVDYIKDLQ

SEQ ID NO: 265 - protein, 50 aa, Artificial sequence
  HLH domain of SEQ IS NO: 174
  UNSURE (34)..(34): Unknown amino acid
HPRSIAERERRTRISKRLQKLQDLVPNMDKQTSXTSDMLELAIQHIKELQ

SEQ ID NO: 266 - protein, 50 aa, Artificial sequence
  HLH domain of SEQ IS NO: 176
  UNSURE (34)..(34): Unknown amino acid
HPRSIAERVRRTRISERIKKLQELVPNMDTQTNXTADMLGLAISYIKDLQ

SEQ ID NO: 267 - protein, 50 aa, Artificial sequence
  HLH domain of SEQ IS NO: 178
  UNSURE (34)..(34): Unknown amino acid
HPRSIAERVRRTKISERMRKLQELVPNMDKQTNXTADMLDLAVEYIKDLQ

SEQ ID NO: 268 - protein, 50 aa, Artificial sequence
  HLH domain of SEQ IS NO: 180
  UNSURE (34)..(34): Unknown amino acid
HPRSVAERVRRSKISERMKKLQELVPNMDKQTNXTAAMLDLAVIYIKDLQ

SEQ ID NO: 269 - protein, 59 aa, Artificial sequence
  consensus motif 1
  UNSURE (11)..(18): Unknown amino acid or a gap
  UNSURE (55)..(55): Unknown amino acid
VPCKIRAKRGXXXXXXXXCATHPRSIAERVRRTRISERMRKLQELVPNMDKQTNXTADM

SEQ ID NO: 270 - protein, 31 aa, Artificial sequence
  consensus motif 2
  UNSURE (10)..(10): Unknown amino acid
  UNSURE (17)..(19): Unknown amino acid
  UNSURE (21)..(21): Unknown amino acid
  UNSURE (23)..(23): Unknown amino acid
  UNSURE (25)..(25): Unknown amino acid
  UNSURE (30)..(31): Unknown amino acid
LDLAVEYIKXLQKQVQXXXLXEXRXKCTCXX

SEQ ID NO: 271 - DNA, 52 bp, Artificial sequence
  primer 1
ggggacaagtttgtacaaaaaagcaggcttaaacaatgaacaggatgacggc

SEQ ID NO: 272 - DNA, 49 bp, Artificial sequence
  primer 2
ggggaccactttgtacaagaaagctgggtttacaacattagctcggaga

SEQ ID NO: 273 - DNA, 6 bp, Artificial sequence
  E-box
  misc_feature (3)..(4): n is a, c, g, or t
canntg

SEQ ID NO: 274 - DNA, 6 bp, Artificial sequence
  G-box
cacgtg

SEQ ID NO: 275 - DNA, 2194 bp, Oryza sativa
aatccgaaaagtttctgcaccgttttcaccccctaactaacaatatagggaacgtgtgctaaatataaaatgagaccttatatatgtagcgctgataactagaactatgcaagaaaaactcatccacctactttagtggcaatcgggctaaataaaaaagagtcgctacactagtttcgttttccttagtaattaagtgggaaaatgaaatcattattgcttagaatatacgttcacatctctgtcatgaagttaaattattcgaggtagccataattgtcatcaaactcttcttgaataaaaaaatctttctagctgaactcaatgggtaaagagagagattttttttaaaaaaatagaatgaagatattctgaacgtattggcaaagatttaaacatataattatataattttatagtttgtgcattcgtcatatcgcacatcattaaggacatgtcttactccatcccaatttttatttagtaattaaagacaattgacttatttttattatttatcttttttcgattagatgcaaggtacttacgcacacactttgtgctcatgtgcatgtgtgagtgcacctcctcaatacacgttcaactagcaacacatctctaatatcactcgcctatttaatacatttaggtagcaatatctgaattcaagcactccaccatcaccagaccacttttaataatatctaaaatacaaaaaataattttacagaatagcatgaaaagtatgaaacgaactatttaggtttttcacatacaaaaaaaaaaagaattttgctcgtgcgcgagcgccaatctcccatattgggcacacaggcaacaacagagtggctgcccacagaacaacccacaaaaaacgatgatctaacggaggacagcaagtccgcaacaaccttttaacagcaggctttgcggccaggagagaggaggagaggcaaagaaaaccaagcatcctccttctcccatctataaattcctccccccttttcccctctctatataggaggcatccaagccaagaagagggagagcaccaaggacacgcgactagcagaagccgagcgaccgccttctcgatccatatcttccggtcgagttcttggtcgatctcttccctcctccacctcctcctcacagggtatgtgcctcccttcggttgttcttggatttattgttctaggttgtgtagtacgggcgttgatgttaggaaaggggatctgtatctgtgatgattcctgttcttggatttgggatagaggggttcttgatgttgcatgttatcggttcggtttgattagtagtatggttttcaatcgtctggagagctctatggaaatgaaatggtttagggatcggaatcttgcgattttgtgagtaccttttgtttgaggtaaaatcagagcaccggtgattttgcttggtgtaataaagtacggttgtttggtcctcgattctggtagtgatgcttctcgatttgacgaagctatcctttgtttattccctattgaacaaaaataatccaactttgaagacggtcccgttgatgagattgaatgattgattcttaagcctgtccaaaatttcgcagctggcttgtttagatacagtagtccccatcacgaaattcatggaaacagttataatcctcaggaacaggggattccctgttcttccgatttgctttagtcccagaattttttttcccaaatatcttaaaaagtcactttctggttcagttcaatgaattgattgctacaaataatgcttttatagcgttatcctagctgtagttcagttaataggtaatacccctatagtttagtcaggagaagaacttatccgatttctgatctccatttttaattatatgaaatgaactgtagcataagcagtattcatttggattattttttttattagctctcaccccttcattattctgagctgaaagtctggcatgaactgtcctcaattttgttttcaaattcacatcgattatctatgcattatcctcttgtatctacctgtagaagtttctttttggttattccttgactgcttgattacagaaagaaatttatgaagctgtaatcgggatagttatactgcttgttcttatgattcatttcctttgtgcagttcttggtgtagcttgccactttcaccagcaaagttc

SEQ ID NO: 276 - protein, 623 aa, Arabidopsis thaliana
MTDYRLQPTMNLWTTDDNASMMEAFMSSSDISTLWPPASTTTTTATTETTPTPAMEIPAQAGFNQETLQQRLQALIEGTHEGWTYAIFWQPSYDFSGASVLGWGDGYYKGEEDKANPRRRSSSPPFSTPADQEYRKKVLRELNSLISGGVAPSDDAVDEEVTDTEWFFLVSMTQSFACGAGLAGKAFATGNAVWVSGSDQLSGSGCERAKQGGVFGMHTIACIPSANGVVEVGSTEPIRQSSDLINKVRILFNFDGGAGDLSGLNWNLDPDQGENDPSMWINDPIGTPGSNEPGNGAPSSSSQLFSKSIQFENGSSSTITENPNLDPTPSPVHSQTQNPKFNNTFSRELNFSTSSSTLVKPRSGEILNFGDEGKRSSGNPDPSSYSGQTQFENKRKRSMVLNEDKVLSFGDKTAGESDHSDLEASVVKEVAVEKRPKKRGRKPANGREEPLNHVEAERQRREKLNQRFYALRAVVPNVSKMDKASLLGDAIAYINELKSKVVKTESEKLQIKNQLEEVKLELAGRKASASGGDMSSSCSSIKPVGMEIEVKIIGWDAMIRVESSKRNHPAARLMSALMDLELEVNHASMSVVNDLMIQQATVKMGFRIYTQEQLRASLISKIG

SEQ ID NO: 277 - protein, 302 aa, Arabidopsis thaliana
MANNNNIPHDSISDPSPTDDFFEQILGLSNFSGSSGSGLSGIGGVGPPPMMLQLGSGNEGNHNHMGAIGGGGPVGFHNQMFPLGLSLDQGKGHGFLKPDETGKRFQDDVLDNRCSSMKPIFHGQPMSQPAPPMPHQQSTIRPRVRARRGQATDPHSIAERLRRERIAERIRSLQELVPTVNKTDRAAMIDEIVDYVKFLRLQVKVLSMSRLGGAGAVAPLVTEMPLSSSVEDETQAVWEKWSNDGTERQVAKLMEENVGAAMQLLQSKALCIMPISLAMAIYHSQPPDTSSSIVKPEMNPPP

SEQ ID NO: 278 - protein, 430 aa, Arabidopsis thaliana
MEHQGWSFEENYSLSTNRRSIRPQDELVELLWRDGQVVLQSQTHREQTQTQKQDHHEEALRSSTFLEDQETVSWIQYPPDEDPFEPDDFSSHFFSTMDPLQRPTSETVKPKSSPEPPQVMVKPKACPDPPPQVMPPPKFRLTNSSSGIRETEMEQYSVTTVGPSHCGSNPSQNDLDVSMSHDRSKNIEEKLNPNASSSSGGSSGCSFGKDIKEMASGRCITTDRKRKRINHTDESVSLSDAIGNKSNQRSGSNRRSRAAEVHNLSERRRRDRINERMKALQELIPHCSKTDKASILDEAIDYLKSLQLQLQVMWMGSGMAAAAASAPMMFPGVQPQQFIRQIQSPVQLPRFPVMDQSAIQNNPGLVCQNPVQNQIISDRFARYIGGFPHMQAATQMQPMEMLRFSSPAGQQSQQPSSVPTKTTDGSRLDH

SEQ ID NO: 279 - protein, 458 aa, Arabidopsis thaliana
MEEERESLYEEMGCFDPNTPAEVTVESSFSQAEPPPPPPQVLVAGSTSNSNCSVEVEELSEFHLSPQDCPQASSTPLQFHINPPPPPPPPCDQLHNNLIHQMASHQQQHSNWDNGYQDFVNLGPNSATTPDLLSLLHLPRCSLPPNHHPSSMLPTSFSDIMSSSSAAAVMYDPLFHLNFPMQPRDQNQLRNGSCLLGVEDQIQMDANGGMNVLYFEGANNNNGGFENEILEFNNGVTRKGRGSRKSRTSPTERERRVHFNDRFFDLKNLIPNPTKIDRASIVGEAIDYIKELLRTIEEFKMLVEKKRCGRFRSKKRARVGEGGGGEDQEEEEDTVNYKPQSEVDQSCFNKNNNNSLRCSWLKRKSKVTEVDVRIIDDEVTIKLVQKKKINCLLFTTKVLDQLQLDLHHVAGGQIGEHYSFLFNTKICEGSCVYASGIADTLMEVVEKQYMEAVPSNGY

SEQ ID NO: 280 - protein, 286 aa, Arabidopsis thaliana
MDQPMKPKTCSESDFADDSSASSSSSSGQNLRGAEMVVEVKKEAVCSQKAEREKLRRDKLKEQFLELGNALDPNRPKSDKASVLTDTIQMLKDVMNQVDRLKAEYETLSQESRELIQEKSELREEKATLKSDIEILNAQYQHRIKTMVPWVPHYSYHIPFVAITQGQSSFIPYSASVNPLTEQQASVQQHSSSSADASMKQDSKIKPLDLDLMMNSNHSGQGNDQKDDVRLKLELKIHASSLAQQDVSGKEKKVSLTTTASSSNSYSLSQAVQDSSPGTVNDMLKP

SEQ ID NO: 281 - protein, 590 aa, Arabidopsis thaliana
MNIGRLVWNEDDKAIVASLLGKRALDYLLSNSVSNANLLMTLGSDENLQNKLSDLVERPNASNFSWNYAIFWQISRSKAGDLVLCWGDGYCREPKEGEKSEIVRILSMGREEETHQTMRKRVLQKLHDLFGGSEEENCALGLDRVTDTEMFLLSSMYFSFPRGEGGPGKCFASAKPVWLSDVVNSGSDYCVRSFLAKSAGIQTVVLVPTDLGVVELGSTSCLPESEDSILSIRSLFTSSLPPVRAVALPVTVAEKIDDNRTKIFGKDLHNSGFLQHHQHHQQQQQQPPQQQQHRQFREKLTVRKMDDRAPKRLDAYPNNGNRFMFSNPGTNNNTLLSPTWVQPENYTRPINVKEVPSTDEFKFLPLQQSSQRLLPPAQMQIDFSAASSRASENNSDGEGGGEWADAVGADESGNNRPRKRGRRPANGRAEALNHVEAERQRREKLNQRFYALRSVVPNISKMDKASLLGDAVSYINELHAKLKVMEAERERLGYSSNPPISLDSDINVQTSGEDVTVRINCPLESHPASRIFHAFEESKVEVINSNLEVSQDTVLHTFVVKSEELTKEKLISALSREQTNSVQSRTSSGR

SEQ ID NO: 282 - protein, 314 aa, Arabidopsis thaliana
MDLMIDTDEYLIDDWESDFPICGETNTNPGSESGSGTGFELLAERPTKQMKTNNNMNSTSSSPSSSSSSGSRTSQVISFGSPDTKTNPVETSLNFSNQVSMDQKVGSKRKDCVNNGGRREPHLLKEHVLAERKRRQKLNERLIALSALLPGLKKTDKATVLEDAIKHLKQLQERVKKLEEERVVTKKMDQSIILVKRSQVYLDDDSSSYSSTCSAASPLSSSSDEVSIFKQTMPMIEARVSDRDLLIRVHCEKNKGCMIKILSSLEKFRLEVVNSFTLPFGNSTLVITILTKMDNKFSRPVEEVVKNIRVALAE

SEQ ID NO: 283 - protein, 292 aa, Arabidopsis thaliana
MSNNQAFMELGWRNDVGSLAVKDQGMMSERARSDEDRLINGLKWGYGYFDHDQTDNYLQIVPEIHKEVENAKEDLLVVVPDEHSETDDHHHIKDFSERSDHRFYLRNKHENPKKRRIQVLSSDDESEEFTREVPSVTRKGSKRRRRDEKMSNKMRKLQQLVPNCHKTDKVSVLDKTIEYMKNLQLQLQMMSTVGVNPYFLPATLGFGMHNHMLTAMASAHGLNPANHMMPSPLIPALNWPLPPFTNISFPHSSSQSLFLTTSSPASSPQSLHGLVPYFPSFLDFSSHAMRRL

SEQ ID NO: 284 - protein, 318 aa, Arabidopsis thaliana
MEGRVNALSNINDLELHNFLVDPNFDQFINLIRGDHQTIDENPVLDFDLGPLQNSPCFIDENQFIPTPVDDLFDELPDLDSNVAESFRSFDGDSVRAGGEEDEEDYNDGDDSSATTTNNDGTRKTKTDRSRTLISERRRRGRMKDKLYALRSLVPNITKMDKASIVGDAVLYVQELQSQAKKLKSDIAGLEASLNSTGGYQEHAPDAQKTQPFRGINPPASKKIIQMDVIQVEEKGFYVRLVCNKGEGVAPSLYKSLESLTSFQVQNSNLSSPSPDTYLLTYTLDGTCFEQSLNLPNLKLWITGSLLNQGFEFIKSFT

SEQ ID NO: 285 - protein, 368 aa, Arabidopsis thaliana
MCAKKEEEEEEEEDSSEAMNNIQNYQNDLFFHQLISHHHHHHHDPSQSETLGASGNVGSGFTIFSQDSVSPIWSLPPPTSIQPPFDQFPPPSSSPASFYGSFFNRSRAHHQGLQFGYEGFGGATSAAHHHHEQLRILSEALGPVVQAGSGPFGLQAELGKMTAQEIMDAKALAASKSHSEAERRRRERINNHLAKLRSILPNTTKTDKASLLAEVIQHVKELKRETSVISETNLVPTESDELTVAFTEEEETGDGRFVIKASLCCEDRSDLLPDMIKTLKAMRLKTLKAEITTVGGRVKNVLFVTGEESSGEEVEEEYCIGTIEEALKAVMEKSNVEESSSSGNAKRQRMSSHNTITIVEQQQQYNQR

SEQ ID NO: 286 - protein, 828 aa, Arabidopsis thaliana
MESREDSFISKEKKSTMKKEKQAIASQRNRRRVIKNRGNGKRLIASLSQRKRRRIPRGRGNEKAVFAPSSLPNDVVEEIFLRLPVKAIIQLKSLSKQWRSTIESRSFEERHLKIVERSRVDFPQVMVMSEEYSLKGSKGNQPRPDTDIGFSTICLESASILSSTLITFPQGFQHRIYASESCDGLFCIHSLKTQAIYVVNPATRWFRQLPPARFQILMQKLYPTQDTWIDIKPVVCYTAFVKANDYKLVWLYNSDASNPNLGVTKCEVFDFRANAWRYLTCTPSYRIFPDQVPAATNGSIYWFTEPYNGEIKVVALDIHTETFRVLPKINPAIASSDPDHIDMCTLDNGLCMSKRESDTLVQEIWRLKSSEDSWEKFDMNSDGVWLDGSGESPEVNNGEAASWVRNPDEDWFNNPPPPQHTNQNDFRFNGGFPLNPSENLLLLLQQSIDSSSSSSPLLHPFTLDAASQQQQQQQQQQEQSFLATKACIVSLLNVPTINNNTFDDFGFDSGFLGQQFHGNHQSPNSMNFTGLNHSVPDFLPAPENSSGSCGLSPLFSNRAKVLKPLQVMASSGSQPTLFQKRAAMRQSSSSKMCNSESSSEMRKSSYEREIDDTSTGIIDISGLNYESDDHNTNNNKGKKKGMPAKNLMAERRRRKKLNDRLYMLRSVVPKISKMDRASILGDAIDYLKELLQRINDLHTELESTPPSSSSLHPLTPTPQTLSYRVKEELCPSSSLPSPKGQQPRVEVRLREGKAVNIHMFCGRRPGLLLSTMRALDNLGLDVQQAVISCFNGFALDVFRAEQCQEDHDVLPEQIKAVLLDTAGYAGLV

SEQ ID NO: 287 - protein, 247 aa, Arabidopsis thaliana
MEDIVDQELSNYWEPSSFLQNEDFEYDSWPLEEAISGSYDSSSPDGAASSPASKNIVSERNRRQKLNQRLFALRSVVPNITKMDKASIIKDAISYIEGLQYEEKKLEAEIRELESTPKSSLSFSKDFDRDLLVPVTSKKMKQLDSGSSTSLIEVLELKVTFMGERTMVVSVTCNKRTDTMVKLCEVFESLNLKILTSNLTSFSGMIFHTVFIEADEEEQEVLRLKIETGIGAYNETQSPTLSIDSLY

SEQ ID NO: 288 - protein, 379 aa, Arabidopsis thaliana
MDESSIIPAEKVAGAEKKELQGLLKTAVQSVDWTYSVFWQFCPQQRVLVWGNGYYNGAIKTRKTTQPAEVTAEEAALERSQQLRELYETLLAGESTSEARACTALSPEDLTETEWFYLMCVSFSFPPPSGMPGKAYARRKHVWLSGANEVDSKTFSRAILAKTVVCIPMLDGVVELGTTKKNGKEHQQVKTAPSSQWVLKQMIFRVPFLHDNTKDKRLPREDLSHVVAERRRREKLNEKFITLRSMVPFVTKMDKVSILGDTIAYVNHLRKRVHELENTHHEQQHKRTRTCKRKTSEEVEVSIIENDVLLEMRCEYRDGLLLDILQVLHELGIETTAVHTSVNDHDFEAEIRAKVRGKKASIAEVKRAIHQVIIHDTNL

SEQ ID NO: 289 - protein, 261 aa, Arabidopsis thaliana
MANLSSDFQTFTMDDPIRQLAELSNTLHHFQTFPPPFSSSLDSLFFHNQFPDHFPGKSLENNFHQGIFFPSNIQNNEESSSQFDTKKRKSLMEAVSTSENSVSDQTLSTSSAQVSINGNISTKNNSSRRGKRSKNREEEKEREVVHVRARRGQATDSHSIAERVRRGKINERLKCLQDIVPGCYKTMGMATMLDEIINYVQSLQNQVEFLSMKLTAASSYYDFNSETDAVESMQKAKAREAVEMGQGRDGSSVFHSSSWTL

SEQ ID NO: 290 - protein, 358 aa, Arabidopsis thaliana
MERFQGHINPCFFDRKPDVRSLEVQGFAEAQSFAFKEKEEESLQDTVPFLQMLQSEDPSSFFSIKEPNFLTLLSLQTLKEPWELERYLSLEDSQFHSPVQSETNRFMEGANQAVSSQEIPFSQANMTLPSSTSSPLSAHSRRKRKINHLLPQEMTREKRKRRKTKPSKNNEEIENQRINHIAVERNRRRQMNEHINSLRALLPPSYIQRGDQASIVGGAINYVKVLEQIIQSLESQKRTQQQSNSEVVENALNHLSGISSNDLWTTLEDQTCIPKIEATVIQNHVSLKVQCEKKQGQLLKGIISLEKLKLTVLHLNITTSSHSSVSYSFNLKMEDECDLESADEITAAVHRIFDIPTI

SEQ ID NO: 291 - protein, 328 aa, Arabidopsis thaliana
MEAMGEWSTGLGGIYTEEADFMNQLLASYEQPCGGSSSETTATLTAYHHQGSQWNGGFCFSQESSSYSGYCAAMPRQEEDNNGMEDATINTNLYLVGEETSECDATEYSGKSLLPLETVAENHDHSMLQPENSLTTTTDEKMFNQCESSKKRTRATTTDKNKRANKARRSQKCVEMSGENENSGEEEYTEKAAGKRKTKPLKPQKTCCSDDESNGGDTFLSKEDGEDSKALNLNGKTRASRGAATDPQSLYARKRRERINERLRILQHLVPNGTKVDISTMLEEAVQYVKFLQLQIKLLSSDDLWMYAPIAYNGMDIGLDLKLNALTR

SEQ ID NO: 292 - protein, 373 aa, Arabidopsis thaliana
MEGLESVYAQAMYGMTRESKIMEHQGSDLIWGGNELMARELCSSSSYHHQLINPNLSSCFMSDLGVLGEIQQQQHVGNRASSIDPSSLDCLLSATSNSNNTSTEDDEGISVLFSDCQTLWSFGGVSSAESENREITTETTTTIKPKPLKRNRGGDGGTTETTTTTTKPKSLKRNRGDETGSHFSLVHPQDDSEKGGFKLIYDENQSKSKKPRTEKERGGSSNISFQHSTCLSDNVEPDAEAIAQMKEMIYRAAAFRPVNFGLEIVEKPKRKNVKISTDPQTVAARQRRERISEKIRVLQTLVPGGTKMDTASMLDEAANYLKFLRAQVKALENLRPKLDQTNLSFSSAPTSFPLFHPSFLPLQNPNQIHHPEC

SEQ ID NO: 293 - protein, 247 aa, Arabidopsis thaliana
MDNFFLGLSCQEENNFWDLIVADISGDRSVSVPIRSAFRSYMKDTELRMMSPKISSSKVNVKKRMVNLLRKNWEEKKNTVAPEKERSRRHMLKERTRREKQKQSYLALHSLLPFATKNDKNSIVEKAVDEIAKLQRLKKELVRRIKVIEEKSAKDGHDEMSETKVRVNLKEPLSGLDSMLEALHYLKSMGTKLKTVHANFSPQEFSATMTIETQIRGEEVEKRVERRLQETEWKLLFLPEASFYKDY

SEQ ID NO: 294 - protein, 311 aa, Arabidopsis thaliana
MRTGKGNQEEEDYGEEDFNSKREGPSSNTTVHSNRDSKENDKASAIRSKHSVTEQRRRSKINERFQILRELIPNSEQKRDTASFLLEVIDYVQYLQEKVQKYEGSYPGWSQEPTKLTPWRNNHWRVQSLGNHPVAINNGSGPGIPFPGKFEDNTVTSTPAIIAEPQIPIESDKARAITGISIESQPELDDKGLPPLQPILPMVQGEQANECPATSDGLGQSNDLVIEGGTISISSAYSHELLSSLTQALQNAGIDLSQAKLSVQIDLGKRANQGLTHEEPSSKNPLSYDTQGRDSSVEEESEHSHKRMKTL

SEQ ID NO: 295 - protein, 162 aa, Arabidopsis thaliana
MERNNRNEGTHEEEQCSLSDIIYSFCSENHSELNPLQEIFGVTKNNDHEKHDEEPDEESYRMAKRQRSMEYRMMMEKPDLASKLENIIEYIKSLKYQVDVMSMAYTTTPVYTPPFYAAAQAPCMSPWGYYTPGVPMMPQQNMTYIPQYPQVYGTVPPNQTQP

SEQ ID NO: 296 - protein, 226 aa, Arabidopsis thaliana
MVSPENTNWLSDYPLIEGAFSDQNPTFPWQIDGSATVSVEVDGFLCDADVIKEPSSRKRIKTESCTGSNSKACREKQRRDRLNDKFTELSSVLEPGRTPKTDKVAIINDAIRMVNQARDEAQKLKDLNSSLQEKIKELKDEKNELRDEKQKLKVEKERIDQQLKAIKTQPQPQPCFLPNPQTLSQAQAPGSKLVPFTTYPGFAMWQFMPPAAVDTSQDHVLRPPVA

SEQ ID NO: 297 - protein, 252 aa, Arabidopsis thaliana
METPAYDFDSLTDLPPLPPSDFTPSNAFTFPDHNLDFSFLDSTLSLLNRHHLSESTRLEQIFYDSTHTQLFHNDDTTTTTTPFLHLPDLKSIDAVEEPTTMKLFPSLSPPLPAAKRQKLNSTSSSTTSGSPTASNDGGIITKRRKISDKIRSLEKLMPWERKMNLAMTLEESHKYIKFLQSQIASLRWMPLESVYNTAGEVGETDLLKSLTRQQILQVLANSPGSRNVLSSRGVCVFSYEQLLSLKTMSRNL

SEQ ID NO: 298 - protein, 454 aa, Arabidopsis thaliana
MGDHHDFINSGSWWKVSSSSSPSSSSSMRASSIESGGSAVFHDKLHHHSLATDHHLQMIGLGLSSQSPVDQWNQSLLRGDSKAETSFGVMLQENLNLDATSNANANTTSSTSSYQLQESDSSHHHQALWRDPQSDFKPQILTSGGNRGFFLDHQFSPHGSSSTDSSTVTCQGFAVDNSSNAMYAATTTTPNSSSGMFHHQQAGGFGSSDQQPSRNHQQSSLGYSQFGSSTGNYDQMASALPSTWFLRSSPPPKPHSPLRFSNNATFWNPAAAGNAGAPPPHDASSNFFPALQPPQIHPQSFDEQPKNISEIRDSSSNEVKRGGNDHQPAAKRAKSEAASPSPAFKRKEKMGDRIAALQQLVSPFGKTDAASVLSEAIEYIKFLHQQVSALSNPYMKSGASLQHQQSDHSTELEVSEEPDLRSRGLCLVPVSSTFPVTHDTTVDFWTPTFGGTFR

SEQ ID NO: 299 - protein, 259 aa, Arabidopsis thaliana
MDCVPSLFMPDSTYEDGLLFSDSFLLSPFISYQNNDVFHSITNKIGGSNKKRSLCDITYGANEANKNDDDRESKKMKHRDIERQRRQEVSSLFKRLRTLLPFQYIQGKRSTSDHIVQAVNYIKDLQIKIKELNEKRNRVKKVISATTTTHSAIEECTSSLSSSAASTLSSSCSCVGDKHITVVVTPCLVGVEIIISCCLGRNKSCLSSVLQMLAQEQRFSVVSCLSARRQQRFMHTIVSQVEDGKQINILELKDKIMTM

SEQ ID NO: 300 - DNA, 848 bp, Solanum lycopersicum
atggagaatctaaacggcttagttcctgacatccctatacaagagcagaaagacaatgctactgcttctgaaaatttcggtcgaagtgttgatgaaatggttgggaaggttgatcagattgagcagagactgaatgaggttgagcatttctattccaatactagtaaaaaacaatcaaacacgccaagaggtggctctattctgaaagacaaagagaaacagatgtctagctttagaaggcggcagcaggatgcatcacgtagagaagcagctggttccaggagaatgcaagaacttatgcgccaatttggtactatattacgtcagatcactcagcacaagtgggcagaaccttttatggaacctgtggatgtcaagggtcttggattacacgattattttgaggttattgagaagcctatggacttcagtactatcaaaaacaagatggaagcaaaggatggttctggctataagcatgtccgagagatatgtgctgacgtgaggctaatatttaagaatgcgatgaaatacaacgaggaaagggatgacgttcatgtaatggcgaaaaccttgttgggaaaattcgaggagaaatggttgcagcttttgcccaaagttgatgaagaggaaaagcggcgaaaggatgaggaagcagaagcccaacaggatatgcagctcgctcaagaggctgctcatgcaaaaatggcaaaagatttaactattgagcttgatgaggtggacatgcaactggaagaactcagggacttggtgcttcagaaatgcagaaagatttcaacggaagacaggaaacaacttgggaatgcgctcactaagctgtctcctga

SEQ ID NO: 301 - protein, 378 aa, Solanum lycopersicum
MENLNGLVPDIPIQEQKDNATASENFGRSVDEMVGKVDQIEQRLNEVEHFYSNTSKKQSNTPRGGSILKDKEKQMSSFRRRQQDASRREAAGSRRMQELMRQFGTILRQITQHKWAEPFMEPVDVKGLGLHDYFEVIEKPMDFSTIKNKMEAKDGSGYKHVREICADVRLIFKNAMKYNEERDDVHVMAKTLLGKFEEKWLQLLPKVDEEEKRRKDEEAEAQQDMQLAQEAAHAKMAKDLTIELDEVDMQLEELRDLVLQKCRKISTEDRKQLGNALTKLSPDDLNKALLIVAQNDPTFQPTATEVELDMNARSESTLWKLKFFVQDVLHTQGKSPVSVKTNNINTSNLLNNNNNNKRRREFYDALAKSSQKKSKKPS

SEQ ID NO: 302 - DNA, 56 bp, Artificial sequence
  primer: prm10548
ggggacaagtttgtacaaaaaagcaggcttaaacaatggagaatctaaacggctta

SEQ ID NO: 303 - DNA, 50 bp, Artificial sequence
  primer: prm10549
ggggaccactttgtacaagaaagctgggtgtaaaatcaggatggcttttt

SEQ ID NO: 304 - protein, 31 aa, Artificial sequence
  motif 3 (part of bromodomain)
  VARIANT (2)..(2): Xaa is Gln, Glu, His, Gly or Trp
  VARIANT (5)..(5): Xaa is Met or Leu
  VARIANT (6)..(6): Xaa is Gln, Lys, Glu, His or Asp
  VARIANT (9)..(9): Xaa is Asn or Asp
  VARIANT (11)..(11): Xaa is Val, Lys or Glu
  VARIANT (12)..(12): Xaa is Thr or Gly
  VARIANT (14)..(14): Xaa is Gln, His, Cys, Arg or Gly
  VARIANT (15)..(15): Xaa is Ile or Leu
  VARIANT (16)..(16): Xaa is Pro, His, Phe, Asn or Tyr
  VARIANT (19)..(19): Xaa is His, Phe, Asn or Tyr
  VARIANT (20)..(20): Xaa is Lys, Asn, Glu, Asp or Gln
  VARIANT (21)..(21): Xaa is Val or Ile
  VARIANT (22)..(22): Xaa is Val or Ile
  VARIANT (23)..(23): Xaa is Thr, Asp, Gln or Glu
  VARIANT (24)..(24): Xaa is Gln, Arg or Lys
  VARIANT (28)..(28): Xaa is Leu or Phe
  VARIANT (29)..(29): Xaa is Gly, Arg or Ser
AXPFXXPVXVXXLXXXDYXXXXXXPMDXXTI

SEQ ID NO: 305 - protein, 13 aa, Artificial sequence
  motif 4
  VARIANT (2)..(2): Xaa is Met or Val
  VARIANT (5)..(5): Xaa is Val or Ile
  UNSURE (7)..(7): Xaa can be any naturally occurring amino acid, preferably one of Lys, Thr, Ala, Glu, Ser, Gln or Asn
  VARIANT (11)..(11): Xaa is Arg, Asn, Thr or Lys
DXRLXFXNAMXYN

SEQ ID NO: 306 - protein, 12 aa, Artificial sequence
  motif 5
  VARIANT (2)..(2): Xaa is Ser or Ala
  VARIANT (3)..(3): Xaa is Glu, Arg or Lys
  VARIANT (4)..(4): Xaa is Phe, Ser, Lys or Thr
  VARIANT (6)..(6): Xaa is Met, Ser or Leu
  VARIANT (7)..(7): Xaa is Asp, Gly, Ala or Glu
  VARIANT (8)..(8): Xaa is Arg or Lys
  VARIANT (11)..(11): Xaa is Glu, Asp or Gly
  VARIANT (12)..(12): Xaa is Lys or Cys
MXXXLXXXFEXX

SEQ ID NO: 307 - protein, 5 aa, Artificial sequence
  motif 6
  VARIANT (3)..(3): Xaa is Trp or Phe
  VARIANT (4)..(4): Xaa is Lys or Arg
TLXXL

SEQ ID NO: 308 - protein, 5 aa, Artificial sequence
  motif 7
EAKDG

SEQ ID NO: 309 - protein, 5 aa, Artificial sequence
  motif 8
  VARIANT (1)..(1): Xaa is His, Lys or Gln
XLEEL

SEQ ID NO: 310 - protein, 5 aa, Artificial sequence
  motif 9
LSNEL

SEQ ID NO: 311 - protein, 6 aa, Artificial sequence
  motif 10
  VARIANT (4)..(4): Xaa is Leu or Glu
  VARIANT (5)..(5): Xaa is Leu, Met or Ile
KALXXV

SEQ ID NO: 312 - protein, 5 aa, Artificial sequence
  motif 11
VIQII

SEQ ID NO: 313 - DNA, 2194 bp, Oryza sativa; identical to SEQ ID NO: 275

SEQ ID NO: 314 - DNA, 1564 bp, Arabidopsis thaliana
agctgctgtctcttccgtcttcgtcctccgacctctgtctttcttctgatccttcgaaaaagctctcgtgagtcactactcttctctaatgtctgtacatgtcaaggaagaacctgtgcttgttccaaactgcgatgtcgagaatacagagcttgcagttttcaatggaaatggagaaagtgagcttgagaattttgggacttgcgtagatgagataacagatagagtgaatcagcttgagcaaaaagttgtggaggtcgaacacttttactctacaaaagatggagctgctcaaactaacacttctaagagtaactcgggcgggaagaagatcgctatttctcaaccaaacaactcgaagggtaactcggccgggaaagaaaaatcaaagggaaaacatgtttccagccctgaccttatgcgtcaatttgcaacaatgtttcgtcagattgctcaacataaatgggcatggccgttcttggagcctgttgatgttaaaggacttggactacatgattattacaaggttatagagaagccaatggacttgggaacaattaaaaaaaaaatggagagttcggagtatagcaatgtcagggagatatatgccgatgttagactagttttcaagaacgcgatgagatacaatgaagaaaaagaagatgtttatgtgatggctgaatctcttctggagaaatttgaggagaaatggctcctgataatgcctaaacttgtggaggaggaaaagaaacaagtagacgaagaagcggagaagcatgccaataagcagcttacaatggaggctgcacaagcggaaatggctagggatttaagcaacgaactatatgagattgatctgcagctggagaaactccgggaatcagtagttcagagatgcagaaaactgtccactcaagaaaagaaaggactttctgcagctctaggtcgtctctcacctgaggatctgtctaaggcgttaaaaatggtttcagagagcaacccgagtttcccggctggagcaccagaagtcgagcttgacattgatgttcagactgacgttacattgtggagactgaaggtgtttgtgcaagaagcattgaaagcagctaacaaaagctctggaggaacaaacgctcaaaacaataacaatactggaactggagagatcaacaagaacaatgcaaaaagacggagagagatctctgatgcaatcaataaagcttcaattaaaagagctaagaaagcttgaatctctctctatctcttgatgtgtttattgatacagaaggaacaagagtttggtgaacaccaatctaaattagaaactttccagttccattgcgcatgttgcttcaaatgttgagcacaatgtaaaaaagaatgaatgggaaaaaaatctgagctatagaggagatataaagaagactgcttgagggagaaattctgacaaatcttctaataaaatcttcagtttgagagatctttggtgtgttgaacgtttcttcgatttcattaccttaaacctcggcacttataatttaaaatcaatttttaaaaatgataa

SEQ ID NO: 315 - DNA, 1110 bp, Arabidopsis thaliana
atggctgactcagtgccaggtcatgtcgccggcggaggtttacagggtttctctgtcgacgccgagtgcatcaagcagcgtgtcgacgaggttttacagtgggttgattcgcttgagcataaactgaaagaagtggaggagttttactcgagcattggtgtctcaaactctggctctattggtaaagatacagaaaaagggagacatgttgtggggattaggaagattcaacaagaggctgcgcgtagagaagctgttgctgctaaaagaatgcaggaccttatgcgtcaatttggaacaatctttcgtcagataactcagcataagtgcgcttggccgtttatgcatcctgtcaatgttgaaggtcttggtttgcatgactactttgaggttattgacaagcctatggacttcagcacgataaaaaatcaaatggaggctaaggatggtaccgggtacaaacatgtcatgcaaatttatgctgatatgcggctagtgtttgagaacgcaatgaattataatgaagaaacaagtgatgtttactctatggcgaaaaagttactggaaaagtttgaggagaagtgggcacactttcttccaaaggttcaagaagaggagaaaatacgagaggaagaggagaagcaagcagcaaaggaggcgctgctagcaaaagaagcatctcatatcaaaacaactagagaattggggaatgagatttgccatgctaatgacgagctggagaagctaatgcgtaaagttgtggaaagatgcaggaaaatcacaattgaggagaagcgtaatattggattggcattgttaaaactgtcaccggatgatctacagaaagtgttgggtatagttgctcaggctaacccgagctttcaacctagagcagaggaagttagtattgagatggacatactggacgaaccaacactatggaggctaaagttctttgtgaaggatgcgttggataatgcaatgaagaagaagaaagaagaggagacaaagactagagaattgagtggagcacaaaagaaagaggtttcgaagaaacgaaatgcgactacaaagttagctgagaggaaaacgaagcggtcacgcatatga

SEQ ID NO: 316 - DNA, 1415 bp, Centaurea solstitialis
acattggtcttggatattggagatgatggaattggaatagagaagatggaggaaaataatgctgtgattgtggatgatattgggcaacaagtagatgatttgttcactaaggttgagaagcttgagcaaagagtaaatgagattgagcagttctacttgaattcaagcaataaacaatccagttcttctcagaaaagcttgcttgtgaaggataaagacaaggtaaagcatattccaggatataagaagcaccaacaggaagcagcacgtagagaggcaactgctgctaagagaatgcaggagattatgcgacaatttggctcaattctgcggcagatcacacagcacaagtgggcctggccatttatgcaacctgtagatgttgaaggtcttggattgcgtgactattacgaggtgattgacaggccaatggacttcagtacgataaaaaatctaatggaggccaaggatggtactgaatataaacatgttcgggatatatgttcagatgtgcggttggtttttcagaatgccatgaaatataatgacgataaaagtgatgttcatgtgatggccaaaactttgttagagaagtttgaagagaaatggcttcagtttttaccaagggttactgaagaggaaaaaagaagggaggaggaggaagcagaagcacagttgagcatacagcgtgcacaggaggcggctcatgctaaaatggctagggatctaagtaatgagctttacgaagcggatatgcacttggaacacctaagagaaactgtggttcagaaatgcaggaaaatgtcgattgaagataaaagaaaccttgggatagctcttactcagttgtctcccgaagatcttagcaaggcactcgatattgtagctcagcataacccaagttttcattcaacagcaatagaggtcgaccttgacatcgatgctcagagtgaatctactctatggaggttaaagtattttgtgaaagatgctctccaaggttatgggaaggatgatgccatcattggaaatgaagctaacaacggccacgtgagccccaccaaaccgacaaacacaacccgaaccatcgcctccaaacggaaaaaacagatatgtaatgccctggccaggactgcaaagaaaaggaatcagaagctctcttcttagaaatggtgcacccataacaaggttagccatcattcttttgggccgtaattttgtgcaatcctgggaaacatgagaacatgactgagtaattcgatgacaaaaaatggtcggtggctcgagtcacgtttaatttgggcatgaaaaatgggtggtggttaaggttttgtaagaacatgaggttccccactttgatggtaatctttttgttgccttgtatggattgtagaagatgttaatgtcatctttct

SEQ ID NO: 317 - DNA, 667 bp, Gossypium hirsutum
ctgtcgaggcagtggagtaagagaagcagtgtagagataaaccctagcaaattagaatcgttctatcgatagatctgctggtcaaagttttttccggtgcttgtttgggttgattttcgtgtctgcggaagtggaaacctaaaagaggctatttgaaggtttcagcttaacagaatgattgccgcgggaagtgttgtgccaaagctgaagttgaagatcaagttcccttctcagaagatagaagatcaatcttttgagtggggccagcaactgagtagttcttttgatggaaagaagacatcacctgctggaaattcagaagagacttcaattgctcacaagcgtgaaccagagggggtgaatgtgggtggtccaccagagaagaggcggaagatggaccgttgcacgactcagcagtgctctgccctactgaaagcactgatgaaacatccagctggctgggtttttaatcaacctgtggatcccaaagcattacagattcctgattatttttctataattaaaaaccccatggatttgggtacaattaagtccaaactaggaaagaatatttatcttggcactgatgagtttgtggctgatattagactaacgttttctaatgccatgctgtataatcccccatttgtctcgtcctctgcctgat

SEQ ID NO: 318 - DNA, 740 bp, Gossypium raimondii
tccaaaagggcatgaggtttatgcgttggctgaggcagcttcttgcgagattcgaggaattgttccgccctctgggtttgaaattggaagagcaagaagatccacaagaaatgaattattacgaggaagagttacaagcaagttcttgggatcacggggaagctgagagaatgaagaaagattgggaaattgataaggaagattccattaacattgcatcaagatctgataaaattggaggggtttcgggctctgtgtcgaaccagaatgcaccaccatcgcagatgcagttgcagccgccagaaaggatggcttctccggtgaggcctccaccggttaagccagtgaagctgccaaagccgaaagctaaggatccaaacaagagggaaatgacaatggaggagaagcaaaagttggggattggattgcagagcttaccacaggagaagatggataatgttgttcatattataaggaaaaggaacgggcatttgaggcaagatggggatgagattgagctcgatatcgaggcaatggatacggagacactgtgggagttggatcggttcgtcactaattataagaagatggtcagcaagatcaagcgacaagctttgatggcaaacaatgttgcatctaatgacagcaatagggtaagcgctaaccatattgtgattgttttatatgaatttgatgatttgtatttgtaaattaattagagaatgatggaaattacagag

SEQ ID NO: 319 - DNA, 784 bp, Gossypium raimondii
ccgactagtcctttgaaacttgccatttaaggtctcccttcaatcatttttcatttcccatttcctttataagcggtttttcatttcctcaattgaactcccccctcttctctgatggaacaggtaatggcatcaattcctgattttgaaattgctgaaactggaatttcgaaagataatagtgcggaagcggagcagttcaaaatccgggttgatgaaatctttcaaaaggttgacgagcttgagcaaaaggtgaatgaagtggaacaattcaacttgaattcaagtaaaaagcaacagagcagttctaaaggaagctccatgggaaaggaacgagataagggaagacaagttccaagcattaaaaagcagcaacaagatgcgtcgcgacgggaagctgctgctgcaaagagaatgcaagagcttatgcgccaatttggcacaatagtgcgtcagattacacagcacaagtgggcatggccgtttatgcaacctgtagacgtcaaaggtcttggtttacatgattactatgagattattgaaaagccaatggacttcagtacaataaaaaaccaaatggaggccaaggatggtaccggatataagaatgttcgagatatatgtgctgatgtaagattggttttcaataatgcaatgaaatataatgatgaaggaagtgacgttcatctaatggccaaaactttgctggaaaagtttgaggagaaatggcagcttcttcttcctaaagtcactgaaagaggagagaagactagatgaggaggag

SEQ ID NO: 320 - DNA, 844 bp, Lactuca saligna
ttccaacccttcttctctctccaacgacggacatcaccggcgacaccctacggtcagtcaccggagcttagtttgcgtcggaaaatatatctactgttccaaaagtatttcaatcgtggattgaagtctgaagaatagatggaaacaatggatggacccgttccggaagttcgaaccgaaggcgaacccgctgttgcggagcaattagggcaaaatgttgatcagatcatcgtgaaggttgatgagcttgagcaaagattaaacgaagttgagcaattctattcaaagccaggaaaaaaacagtcaaacacctctaaagcaagttcagtgatgaaagaaaaagataaagataaacaaataaccagctttaaaagacgccagctggacgcatcacgcagagaagcagctgctacaaaaagaatgcaagatcttatgcgacagttttctgtattattacgccagcacatcattggccacaagtgggctggaccatttatgcaacctgtggatgtagtagggcttggtttgcatgattactatgaggttattgaaaagccaatggacttcagtacaattaaggccaaaatggaggtgaaagatgggacagggtataataatgtgagagaaatatgtgcagatgtgagattaatttttaaaaatgctatgaaatataatgatgaaagaaacgatgttcatgtcatggccaaaactttactcgcaaaatttgaggaaaaatggctccaacttttgccaaaagttgacgaagaggatgaaagacgaaaaaaggagaagcagaaccacagttagatatccaacttgctcaagaggtttctcatgccaaaat

SEQ ID NO: 321 - DNA, 1110 bp, Medicago truncatula
atggaaccatacccacaacgaccatctgccaatgctgatcggttggagggtttcaggaattctgttgacgaatttcgtacccaagttgacaatcttcagaaacaagtgattgaagttgagcactactacgaatcctctggtatttttcaaggcaacagttctagaggtggttcagttgtaaaagagaagggtcgggagaaaactcttgctggcactaaaacaccgctgcaagatgcattgcgtacggaaaccgctgctggaaagaggatgcaggagctgatgcgtcagttttccacaatattacgtcaggcaacttttcagatcactcagcacaagtgggcctggccctttctggaacctgtagatgtagaaggtctcgggcttcacgactattatgagattattgataagcccatggacttcggtacaataaaaaataaaatggaagctaaggatggcactggatacaagaatgtccgggagatttatgcggatgtgagattgatatttaagaatgccatgaagtacaacaatgaaaaacatgatgtccatgtaatggcaaagaccttgatggaaaaatttgaagataaatggctgctactgttacccaaagttgctgaagaggaaaagagacaaatagaggaagaagctcaagtgcagatggacattcatcttgctcaggagacgacctatgccgatatggctaaggatttaagcaatgagcttaatgaggttggtatacgcttgatggaattcagagaaaaggtcattcagaattgcaggaaactatctaccggagagaagaaagcacttgggaaggctatcgccaaattgtctcctgaaaatctccagagggcattggatttagttgctgagatcaacccaagctttgaatctactgcagacgaggtggtgcttgacattaatgctcagagtgactacacagtctggaggttgtaccattttgtgaaaggtgctctagaaggtcaacaaggcacagctgttaataatgataccgaggagaagagatacagctctagaaaaaggcgagaattttctgatgatcatgccaaaaacccatcaaagagtagaaaactatcgacttcctga

SEQ ID NO: 322 - DNA, 1077 bp, Medicago truncatula
atgtcacttgggaagcaagtaaatgatgttgagcagttttaccaatccactgatgttcaacagaatgattgcaaatacaaaggcagggagaagcctcctaccggatctaagaaggcgttgaaacgtgcttcagaagatatgcaagcggagatgaggcacaattttaacaaaatattcaatgaggcaagtgcagtgaagctgcttgccatgaccaattatatattacttcagcctctatcattcagctatatttatccggtgttgttaaatagtagctatagtggagtggaatttgaacatatcaccatcatagctaaggataaatgggcgtggccatttttggatcctgtagatgttgaaggtcttgggctgtatgactattatcagatcattgagaagcctatggattttagtactataaaaataagaatggaggctaaagatggctctggttataagaacgtgagggagatatatgctgatgtaaggctgatttttaagaatgcaatgaagtacaatgatgaaaagaatgatgtccatgtgatggctaagaccttgctggaaaaatttgagggttgcacttatagaaataacagtggtttcagccatcctatgcaatatttttctgagagtgacctatcaaaggaagaagcacatgaggaattgaataaaaggcttgctcaagaagcaacttatgccaatatgactagggaattaagcactgagctgtctaaggttgatatggctttgagaagtctcaaaacaacagcgatttcacagtgcaggtctgtaaagagtcactcgatgaatgatagtttagtgctacatattatctgtcacgctgtcatcgatttgaattgtctagctaagatcaggaaactgtcacatccggagaaattaatacttgcgaatgccttcaccaaattgtctcctgataacatcgtcaaggcattggagatagttaaagagagcaatccaaatttcaaagatcgtattgatatggtgacccttgaccttgattctcagagcgactacacattgtttagattgcatatgtttgttaaaaacacactagaa

SEQ ID NO: 323 - DNA, 1083 bp, Oryza sativa
atggtgccgggaggtggagtcccacagggggcggagggagggagggctatggcggcggcggagacggccgccactgccgccgccgccggggagagggccccggggacggaggtggacgcgttccggcgccaggtcgaggacctcgtctccaagaccgaccagctggagaggagggtgaatgaagtggtgggattctacgacgggaagaaacatggcagtggtggccggaaggctggtcgcaaggatagcagcctttccaaagggatgcctgatcttatgcgccagtttggcacgattgtgcgccagatcacatctcatgaatgggccgagccatttctcaagccggttgatgtggtaggccttcagcttgatgactattacaagattatcaccaaacctatggatttttcgaccatacaaaagaaaatggaagggaaagatgacaacaagtataacaatgtccgagaaatatattcggatgttagattaatttttgccaatgcaatgaagtacaatgatgaacgacatgatgttcatataatggcgaaatcattgcttgagaaatttgaagagaaatggctccagcttcttcctaaagttgaaaatgaggaaaggaaacaaaaggatgaggaatccaacggtgttccaaaagtgaacatttctccagaagaagctattgcaaaactagcaaaagatactgacaatgagctgattgaaatcaacaagcagttggaggagcttcggcaaatggtggtccagaaatgccggaaaatgactacatatgagaaaagaaaactgggtgcaggtctctgccacctgtctccagaagagcttactaaggcattggagatggttgcacaagacaaccctagcttcgaagctaaaggagacgaactggaacttgatatggatgctcagagtgagacaaccctctggaggttgaaattctttgtgagggaagcattggaacgacaggccaacgtcgcttctggcaggactgatgaaaatgcgaaaagaaagagggagatatgcaatgctctggccagaactgcttcaaaaagagtcaagcagcaacctaattag

SEQ ID NO: 324 - DNA, 1522 bp, Oryza sativa
ccgtcgagtcgaggcgccggtggtttcgcctttttcgctcgcagacggccgccggcgacgcgcgtggcggcgagccctagatatggtgccgggaggtggagtcccacagggggcggagggagggagggctatggcggcggcggagacggccgccactgccgccgccgccggggagagggccccggggacggaggtggacgcgttccggcgccaggtcgaggacctcgtctccaagaccgaccagctggagaggagggtgaatgaagtggtgggattctacgacgggaagaaacatggcagtggtggccggaaggctggtcgcaaggatagcagcctttccaaagggatgcctgatcttatgcgccagtttggcacgattgtgcgccagatcacatctcatgaatgggccgagccatttctcaagccggttgatgtggtaggccttcagcttgatgactattacaagattatcaccaaacctatggatttttcgaccatacaaaagaaaatggaagggaaagatgacaacaagtataacaatgtccgagaaatatattcggatgttagattaatttttgccaatgcaatgaagtacaatgatgaacgacatgatgttcatataatggcgaaatcattgcttgagaaatttgaagagaaatggctccagcttcttcctaaagttgaaaatgaggaaaggaaacaaaaggatgaggaatccaacggtgttccaaaagtgaacatttctccagaagaagctattgcaaaactagcaaaagatactgacaatgagctgattgaaatcaacaagcagttggaggagcttcggcaaatggtggtccagaaatgccggaaaatgactacatatgagaaaagaaaactgggtgcaggtctctgccacctgtctccagaagagcttactaaggcattggagatggttgcacaagacaaccctagcttcgaagctaaaggagacgaactggaacttgatatggatgctcagagtgagacaaccctctggaggttgaaattctttgtgagggaagcattggaacgacaggccaacgtcgcttctggcaggactgatgaaaatgcgaaaagaaagagggagatatgcaatgctctggccagaactgcttcaaaaagagtcaagcagcaacctaattagtggcctctgaccattgtgcatttgtgtcttcacttgttgtttagaatgtttctgagaaatagccttgcaaaataatctcttccttctatggagcatgtaaataactagtctctgcttagctgtgtgaggttgcaacaatagcgaaatgtttcccaaaaaaagggtcttatgttccacctgtagattgtgtgttccatgcaattgtaccatcaagaaaaatctagtatagcgttgctggcgccatttcactgtggccattagcccattactcattccgaagagcaaactgtgaaaaaaaatccataagaacaaaatgtgatttttgttttcaaaagaatgaacaattcttagcattcc

SEQ ID NO: 325 - DNA, 1554 bp, Physcomitrella patens
atggtcaatggaaaatgtatgcttaaagacatggtagctgtagtcgtgtcgctctcgtttcccgccttcagtcttgaaggtttcctacttgtgctactagatgcgaggcccctttctgagcgccgatcagattgcatttctaccgtcaccaagcaaggtttcgacgtcgttcagagaactcgagatggacacatcaccaatttaccttgctctgaacccatttctgagaagaaggctttagtaacccagcaaatgaaaatgaaaccacgaattggagtggatggtgacatggctgcagaacctgctcaatgtggaccagtacaggaagggcgaggagcaagagatagggacgacagagtcccatcaccagctgcagttgggcagaatagggacagcacggtagaagccaatgaggttgaaacggaggtctcagaggccgcgagaaatcttctgaagcaacaagttcagaccctcacagcaaaagttgaagagattgagagaaagattgcactggtaacccaagaaaagaatgctgaaagtaaaagcaaaggagagtcaggaactggtttgaaagatcgcgacaaaggttgtggtaccctcaacaaaaagcagcagtatctgctagataataacagaggggatgtagctcgaagcaagcgtaatcaagaattaatgaatcaaattagaggcatctggagacagatatctcagcacaagtgggcttggccttttttaaaacctgtggatgtcgaaggcctgggtctgcacgactacaacgatgtaattgagaaaccaatggacttgggcacaataaagaacaaaatggatgcgaaagacacttcaggctaccagcatgttcaggaggtctgtgatgatatgcgtttggtcttctccaatgccatgacttataatccagagggctctgacgtacatgtgatgtcgaaaaccctctctgacaagtttgaggaaaaatggaaggctcttatagaaccaaagttgcactttgaggaatcgaagactcagcaggaagacaatgaagtacagctgaaagaagcaggaatgcaggtagttgaagagatagacacaaagaaactgacagaacaatatttgcttcagttggaggaactcgataaacagctagaagacctaaagcgacaagcagctcctacgtgcagcagggcgatgtcaatcgaggagaaaaggcatctgggacagaaccttgggaaattgcctcctgaaaatctgagtcacgtcatacaaatcattgcccagagaaacccatcgttcaatataaattccgacgaagttgaagttgatattgacgcccaggaccccgcaacactttggaggttgcagcgctatgtgcaggcagttctaagtggctccggagcacggcagaccacggcgaggaaccagcccaccaagcgcagctgcggttatgtacagaacaaaaattcgagcaagcgtggcaagaagaccaccacgccttgccatggacaactctctcacgtcatgaagtacagctcaataccaggattcttatcccaccagtaa

SEQ ID NO: 326 - DNA, 1212 bp, Physcomitrella patens
atgaaacctcgaattagcgccgaaagtgacgaggccacacaacccgcacaggaaggtcgaggtgcaagagctaaggatgacagaccgcaattgccagctgcagttgcacagactagagacagcattccaggagctaacgaggacgaaacggaaacctcagaggctgcaaaagcccttctaaaacaacaggttcaggccctgacagccgaagttgaagagatggagaggaaaatcgccgaagtaactcagaagcggaatgctgaacgcaaaagcaagggtaaaatagggacttctgtgaaagaccgtgataaaggtgccggtgcttttaccaaaaagcagcagcaattgcttgatattaacagacgggatacgtctcgaagcaagcggatgcaggagctaatgcgtcaggttcaaagcatttggaaacagatatctcagcataaatgggcttggcctttcatgaagcccgtggatgtcaagggtttgggtctccatgactactacgatgttattgaaaagccaatggacttgggcacaataaagaacaaattggatgtaaaagatggtttggggtaccagcatgttcaggaggtctgtgatgacgtgcggctggttttttccaatgctatgacttataatccagaggggtctgatgtctacgtgatgtctaaaaccctctctgacaaatttgaggagaaatggaagacgcttattgaaccgaaattgcaagaggaattgaaaagatcacatgatgacagcgaagtgcaagctaacgaaggaggagttccggtagtagaagagatagatacagaaaaagtgattgagcaatatgcacttcagttggaggaacttgataagcagctagaagagctgaagcaacaagcaactcctaagtttagcagagcaatgtctgtagaggaaaaaaggcatctggggcagagcttggggaggttaccacctgataatttgagccacgtcattcaaattattgcacagaaaaacccctcctttaacataaactccgacgaggttgaagttgacattgacgcccaggacccggcaaccctctggagattgcagcgatacgtgcaggcagttttaagcggttcggcagctcgccaagctacaccgagaagccaggctaccaagcgcaatggcagttctctgcttaaaaaaaactccagcaagcgtagcaaggccactacgtcttga

SEQ ID NO: 327 - DNA, 807 bp, Physcomitrella patens
atgacttcgtacattcctcagatatcctcgcataagtgggcttggcctttcatgaagcccgtggatgtcaagggcttgggtctacatgactattatgaggtcatcgaaaagccaatggacctgggcacgataaagaataaaatggatgcaaaagatgcttcgggataccagcatgttcaggaagtctatcaagacgtgcggctggtcttctcaaatgctatgaaatacaatccagagggttctgacgtatatgtgatgtctaaaacactgtcagaaaaatttgaggagaaatggaagactcttgtagaaccgaaattgcacgaggaggagtcgaaaaaatcgcaggaagacaatgaagtaaggacgaaagaaccaggagtccaggccgtggaagagatagatacagaagaattgactgaacaatatgcacttcagttggaggagcttgataagcagctagaagatttgaagcaacaagcaactcccaacagcagggcaatgtctgtagaggaaagaaggcatctggggcagagcttagggagattgccgcctgataatttgagtcacgtcattcaaatcattgcacagaaaaacccctcgttcaacatgaactccgacgaagtcgaagtagatatcgacgcccaagaccctgcaacactctggaggttgcagcgatacgtgcaggcggtattaagcgggtcgggtggtcgccaggctacgccgaggaaccaggctgccaaacgcaatggtagctctctacatagcaaaagctccagcaagcgtagcaagaaggtcaccgttccttga

SEQ ID NO: 328 - DNA, 1155 bp, Populus trichocarpa
atggaaccgtcggttttttattttggtaatcttccggtaagaaatcccgacggcaacgatgccgacacggagggtttcaagcatagcgtggatgaaattttccaaaaagttgataaattggagcaaagaatgaatggggttgagcagttttacttggatataagtaaaaagcagcagagtggttcttcgaaaggtggtggtagctcgattgtgaaagataaagataaagagaggcatgttactagtattaggaaacagcagcaagatgcgtcgaaacgagaggctgctgctgctaagagaatgcaagagcttatgcgccaattcggtaccatattgcgtcaaatcacgcagcacaaatgggcttggccttttatgcaacctgtagatgttaaaggtcttaggttgcatgactattatgaggttatcgacaagcccatggacttcagtacaataaaaaatcaaatggaggctaaggatggcacaggatataagaatgtcagagagataagtgctgatgtgaggttagtgtttaagaatgcaatgaaatataatgatgaaagaagcgatgttcatgttatggccaaaacattgctgggaaaatttgaggagaagtggctacaacttctgcctaaagtcactgaagaggaaaaaagaagagaagacgaggaagtggaggctaaattggatatgcagcttgctcaggaggctgctcatgctaaaatggctcgtgatttgagtaatgagctttatgaggttgatatgcatctggaagagcttcgggatattgttgttcaaaagtgcagaaagatgtccactgaagagaaaagaaagctcggggtggctcttacgagactttctcctgaagatctaactaaagcattggagattgttgctcggagtaatccaggcttccaagcaactgctgaagaggtggatctcgacattgatgctcagactgaatccaccctgtggaggctaaagtttttggtgaaagatgtgctggaagtccagggaaaaagtgcggcaagcacaggtggcaataacaacaacaacaacaacaacaagaacaccagcaataacaacaaacgaaaaagagagatttgcgatgctattgccaaaactgccaagaaaaggagtaaaaagccctcttcttga

SEQ ID NO: 329 - DNA, 1113 bp, Populus trichocarpa
atggaagcgataagcccgtcgattgtggattccggtaatctcccgataagaaattccgatgccgaagcagagggtttcaagcatagcgtggatgaaattcttcaaaaagttgataaattggagcaaagagtgaacgaggtcgagcagttttactcgaagaatacaagtaaaaagcagcagagtggttcttcgaaaggtggaagctccactgtgaaagataaagataaagagaggcatattcctactgctgctaagagaatgcaagagcttatgcgccaattcggtacaatattgcgtcaaattacacagcacaaatgggcgtggccttttatgcaacctgtggatgtcaaaggtcttggtttgcatgactattatgaggttatcgacaagcccatggatttcagtacaattaaaaatcaaatggaggccaaggatggcacaggatacaagagtgtaagggagatatgtgctgatgtgaggttagtgtttaagaatgcaatgaaatataatgatgaaagaagtgatgttcatgttatggccaaaacattgctgggaaaatttgaggagaaatggctacagtttctgcctaaagtcactgaagaggagaaaagaagagaggaggaggaagcggaggctcaattggatatgcagcttgctcaggaggctgctcatgctaaaatggctcgtgatttgggtaatgagctttatgaggttgatatgcatctggaagagcttcgagaaatggttgttcaaaagtgcagaaagatgtccaccgaagagaaaagaaagcttggggcagctcttacaaggctatctcctgaagacctgaccaaagcattggagattgttgctcagaataatccaggctttcaagcaactgctgaagaggtggaccttgacatcgatgcacagagcgaaaccaccctatggaggctaaagttttttgtgaaggatgcgctggaagtccagggaaaaagtgcagccagcgcaggtggccgaaacaacaccactacccctagcaataataacaataacaacaacaaacgtaaaagagagatttgcgatgctattgccaaaactgccaagaaaaggagtaagaagccctcctcttga

SEQ ID NO: 330 - DNA, 1134 bp, Populus trichocarpa
atggaacatatgatcagatctattcgaggttccagaaatgttggaactgggaacattgaagttgataactcagaaatggagtttgagcaacgagtagatgcagttgaaagatactacgcagataataaagaactaaatactgctaaatgtagctcaattctgaaggataaaatcaagaagaaacatttgatgaccgttgagaagcaacaacaagattctgaaaagataacgcaagacctcatgcgccagtttgcagtaatatttcgccagatcgctcagcacaagtgggcatggccttttctggaaccagtggatgttgaaggtctttgtttgcatgattattatgaggttattgaaaagccaatggactttcgtacaataaagaatagaatggaggctaaggatggcactgggtacaagaatgttcgggagatatatgctgatgttagacttgtttttaagaatgcaatgaaatataatgatgaaagagatgatgtccatgtgatggccagaactttgttagaaaaatttgaagaaaaatggctgcaacttctgcctaaagttgccgaagaggaaaaaagacgagaaaaggagcaaacagcaactcaggtggctacgaaactagctgaggagtcttcttatgctaacatggctcaggatttaagcaatgaactgcatggagttgatatgcaattggagagaatcagagaaatggtggttcgcaacagcagaaagatatccactgaagagaagaagaaacttgggacagcgctcactcaattatctcatcaagatctgattagggcactggaaatagttgctgagcataatccgagcttccaagcaacagctcaagaggtgaaccttgacatggatactcagagtgatgtgacgttatggaggttaaaggtttttgtgcaagatgcactaaaagtttctggcaggaattctgggggcacgggtatggggtgcaacagcaatattaacaatgatgataacaaggccaagatcaacatcaacaacaagaacaggaataccactgcttccaaaaggaaaggagagaggtgtgatgccgtgaccaaggcatctgccaagaggactaagaagatctcactcaattcccttaatccatag

SEQ ID NO: 331 - DNA, 1393 bp, Sorghum bicolor
aaaaagggaaaaggaaacaaaaaaaaaccgtcagagcggcggtcggctgtagtgcagttgcaggtgttcgccggcacacgcgcgcggccgcgaaccctagatgacgccggcgaacggcgccccagcgccggcagcggagtctgtcccccccgaggtggagtcggaggccgatgcgttccggcgccaggttgacgacctcgtctcgaagaccgacgtgctggagaagcgggtgaaagaggtggtggacttctatgatggcaagaagcacggaagcggcgggcggaagggcggcggtggcggcaggcacggggcatactcgagggggatgcccgaccttatgcgccagttcggcgtgcttttgaaagagatcacctctcataaagatgcatggccatttctgaagccggtggatgttgtaaccctgcacattcctgactatcacaaaattattacccaacctatggacttctctaccatccaaaagaaaatggaaaggaaagatggtacctgttacaccaatgttcgagaaatatgttctgatgttcgattaatttttgccaatgcgatgaagtacaatgatgatcaaaatgtagtccacttgatggctaaatcattgcttgagaaatttgaagagaagtggctccattttcttcctaaagttgagagtgaggaaaaaagacaaaaggaggaggaatcaaagggtgttgcagccacaaatacttctcgagaagttgcaatcgcaaaattagcaaaagatactgatgatgagctaaatcagatcaataggaagctggaggaactccggaaaatggtggttcacagatgcaggaaaatgaccacagatgagaagaggaagctgggtgcagggatctgccacttgtctccagatgatcttaacaaggcgctagaaattgttgcacaagacaatcctagcttccaaactaaagcagaagaagtggatcttgatatggatgcccagagtgagacaaccctatggaggctgaaattctttgtgagggaagcactggaacgacaggccaacgttgcctctgggaagatggacgaaaacgccaaaagaaagagggagatatgcaatgctctggccaaaacagcatcgaaacggatcaagaagcaaccctagccatcttccagatctttgactcgcgtccttctgtgattgttaagaagtttttttggtaggagtagccattagctttgtgaaaggatttcctgcattttttgtggagctgtgtatatagtacactgtctgtccagtaacaagtgatttcatgtgtaaccatgagctgatcgcatcgactctgaccaaaacaacaaacattgtctctacttgcaattgctagaatgaaagccacaaccacaatgtgattgatgt

SEQ ID NO: 332 - DNA, 1261 bp, Triticum aestivum
cgaggggcggcaatggagggagcgtggccccatccggcgccgatggagccgaccaccgccgcggatgggcctcaagtgtcggaggtgaactcgttccggcgccaggtcgacgacctcctctccaagaccgacgtgctggagaagagggtgaacgaggtggtagggttctacaattccaagaagcacagcagtggaggccgcaaggctggcggcaggtacgcggaaaacggtgccagggacagccacggcaatgggatgcccgacctcatgcgccagtttgccggtatcattcgccagattacatctcatgaatgggcacagccgtttttgcaaccggtagacgtcgtaggtcttcaacttgatgactatcaccagattataacaaaacctatggatttctcgaccatccgaaacaaaatggaagggaaggaaagtaccacatataacagtgtccgagaaatatattctgatgttagattagtttttaccaatgcaatgaagtacaatgttcaaggtcaccctgttcacataatggccaagttcctactcgagagatttgaggagaaatggcttcaccttctccctaaagttgagaacgaggaaagggaacgggaggaaccaaatgatgctccaaccataagcatttctccggaagctgccattgcaatattagctgaagatactggtaatgagctgaatgagattaataagcagctggaggagctccagaaaatggtggttcagagatgcaggaaaatgaccacggacgagaagagaaaactcggcgcaggtctttgccaattgtctccagaagatcttaacaaggcgctagagttggtcgcgcaagacaatcctagcttccaaactacagctgaagaagtggaccttgacatggatgctcagagcgagacgaccctctggaggctgaagttctttgtgagggaagcattggaacaacaggcgaatgtaggcgtagtggcctgtggcaagatcgatgaaaacacgaagaggagccgcgacatgtacaatgctctagccaagaccgtttcgaaacggattaagaaataaccttagcggctcggcctttctgatggttcatggtatttctgtagaaaatagggccatgttctcccttgtgtgaagacatgttgtatatatacgaagatgaatctgcactaagatatgcttggtcgcacccggtctcatgtggcatgggtagcatgctattggtagctatgtaaaataaagagcaatgttggcc

SEQ ID NO: 333 - DNA, 1317 bp, Vitis vinifera
atggctttccgcattgctttatccccatcagtaataacagaaagaggcttcttgttattcattgcatccagaaaagtctctaagacccataaaactgaacggttaacaaacagaccccagtgttttcataaggaagatcgagagacccggccgcctctggaatgtcttgtatcagatgaaccaatggatgcatcaattacaaatgttagaaatgtggaaattggaaagcacaaaggtaatactgaccaagttgagggtttcaaatcttgtgttgatgacatattcacaaaggttgataagcttgagcaaagagtgaatgaagttgagctattctacttgaccgctagcaaaaggcaactgaatggttataaaggtagctcagtccttaaagataaggagaggcatgttgccagtgcaaagaagcagcaacaagatgcatcacgcagagaagcagctgctgtgaagagaatgcaagagcttatgcgtcagttcggcacaatattgcgtcagatcatgcaacacaagtgggctgggccctttttgcatcctgtagatgttgaaggccttggtttgcatgactactatgaggtaattgataagcccatggacttcagtacaataaagaatcaaatggaagctaaggatggtactggatataagaatgtcagggagatatgtgcggatgtgaggttggtttttaagaatgcaatgaaatacaatgatgagagacatgatgttcatgttatggccaaaactttattgggaaagtttgaggagaagtggctgcaacttctgcctaaagttgcagaagaggaaaaaagacgagaagaggaagaagcagaggcgcagttagacatgcagcttgctcaggaggctgctcatgccaaaatggcaagagagataagtaatgagctttacgatattgatatgcatctggaagaagtcagagaaatggttattcggaagtgcagaaaaatgtcaactgaagagaaaaggaaacttggagcagccctctctagattgtccgctgaagatctgagtaaggctctggagattgttgcacagaataacccgagctttcaagccacagctgaagaggtggatcttgacattgatgcacagacggagtcgaccttatggaggttaaagttttttgtgaaggatgcattggaagttcagggaaagagttcagcaagcaagggggacaacaccaacaccaccaccactgccaccaacaacaacaaacggaaaaaagagatttgtgatgctattgccaagactgcaaagaagaagagtaaaaagctccctctcgattaa

SEQ ID NO: 334 - DNA, 855 bp, Vitis vinifera
atggctctttggcatatttccctgatgtctctgaggttttactggcagatcatgcaacacaagtgggctgggccctttttgcatcctgtagatgttgaaggccttggtttgcatgactactatgaggtaattgataagcccatggacttcagtacaataaagaatcaaatggaagctaaggatggtactggatataagaatgtcagggagatatgtgcggatgtgaggttggtttttaagaatgcaatgaaatacaatgatgagagacatgatgttcatgttatggccaaaactttattgggaaagtttgaggagaagtggctgcaacttctgcctaaagttgcagaagaggaaaaaagacgagaagaggaagaagcagaggcgcagttagacatgcagcttgctcaggaggctgctcatgccaaaatggcaagagagataagtaatgagctttacgatattgatatgcatctggaagaagtcagagaaatggttattcggaagtgcagaaaaatgtcaactgaagagaaaaggaaacttggagcagccctctctagattgtccgctgaagatctgagtaaggctctggagattgttgcacagaataacccgagctttcaagccacagctgaagaggtggatcttgacattgatgcacagacggagtcgaccttatggaggttaaagttttttgtgaaggatgcattggaagttcagggaaagagttcagcaagcaagggggacaacaccaacaccaccaccactgccaccaacaacaacaaacggaaaaaagagatttgtgatgctattgccaagactgcaaagaagaagagtaaaaagctccctctcgattaa

SEQ ID NO: 335 - DNA, 1494 bp, Zea mays
gaaaaaaccgtcagagcgacgttagtcggctcagctgtagtgtagttgcaggtgttcgccggcacacgcgcgtggccgcgaaccctagatgacaccggcgaacggcgccccagcgcgggcagcggaggcgggcccccacgaggtggagtcggaggccgacgcgttccggcgccaggtcgacgacctcgtctcgaagaccgacgtgctggagcggcgggtgaaagaggtggcggacttctacgatggcaaaaagcacggaagcggcgggaggaagggtggtggtggtggcaggtatggggcatcctcgaggggaatgccggaccttatgcgccagttcggcgtgcttttgaaagagatcacctctcataaagatgcatggccatttctggagccggtggatgttgtaactctacagcttcctgactatcacaacattattacccaacctatggacttctctaccatccaaaagaaaatggaaaggaaggatggtacttgttacaccaatgttagagaaatatgttctgatgttcgattaatttttgccaatgcgatgaagtacaatgatgatcaaaatgtcatccacttgatggctaaatcattgcttgagaaatttgaagagaagtggctccattttcttcctaaagttgagagtgaggaaaaaagacaaaaggaggaggaatcaaagggtgttgcagccacaaatacttctcgagaagttgcaatcgtaaaattagcaaaagacactgatgatgagctaaatcagatcaacaagaagctggaggagctccggaaaatggtggttcacagatgcaggaaaatgacgacagacgagaagaggaagctgggtgcaggtatctgtcacttgtctccagatgatcttagcaaggcgctagagattgtcgcacaagacaatcctagcttccagactaaagcagaagaagtggatcttgatatggatgcccagagcgagacaactctatggaggctgaaattctttgtgagggaagcgctggaacgacagggccacgttgcctctgggaagatggactataacgcccagggaaaagagggagatatgcaatgctctggccaaaaccacctcgagacggatcaagaagcagccctagccatctttccatatcatcactcgcgtcctctgattgtttagaagttctttttttgatactagccccccagctttgtggaacgttttcctgcattttttttgtgatgtgtatatagtagtatagtgaactgtccagtccagtaacaagtgatttcgtgtgtaaccatgagctggtcgcattcgcgtcccctctgatccaacaacaaacattgtctcacaatgtgattgattgtagaagcaagcttttgtcacagggcgatgttgctcacttgtggaatcagatgatgcatacatttcgtaactgttcattcattctccaccttggcttgaaaattaaggtgagaaggcctgcggatttacatgtt

SEQ ID NO: 336 - protein, 386 aa, Arabidopsis thaliana
MSVHVKEEPVLVPNCDVENTELAVFNGNGESELENFGTCVDEITDRVNQLEQKVVEVEHFYSTKDGAAQTNTSKSNSGGKKIAISQPNNSKGNSAGKEKSKGKHVSSPDLMRQFATMFRQIAQHKWAWPFLEPVDVKGLGLHDYYKVIEKPMDLGTIKKKMESSEYSNVREIYADVRLVFKNAMRYNEEKEDVYVMAESLLEKFEEKWLLIMPKLVEEEKKQVDEEAEKHANKQLTMEAAQAEMARDLSNELYEIDLQLEKLRESVVQRCRKLSTQEKKGLSAALGRLSPEDLSKALKMVSESNPSFPAGAPEVELDIDVQTDVTLWRLKVFVQEALKAANKSSGGTNAQNNNNTGTGEINKNNAKRRREISDAINKASIKRAKKA

SEQ ID NO: 337 - protein, 369 aa, Arabidopsis thaliana
MADSVPGHVAGGGLQGFSVDAECIKQRVDEVLQWVDSLEHKLKEVEEFYSSIGVSNSGSIGKDTEKGRHVVGIRKIQQEAARREAVAAKRMQDLMRQFGTIFRQITQHKCAWPFMHPVNVEGLGLHDYFEVIDKPMDFSTIKNQMEAKDGTGYKHVMQIYADMRLVFENAMNYNEETSDVYSMAKKLLEKFEEKWAHFLPKVQEEEKIREEEEKQAAKEALLAKEASHIKTTRELGNEICHANDELEKLMRKVVERCRKITIEEKRNIGLALLKLSPDDLQKVLGIVAQANPSFQPRAEEVSIEMDILDEPTLWRLKFFVKDALDNAMKKKKEEETKTRELSGAQKKEVSKKRNATTKLAERKTKRSRI

SEQ ID NO: 338 - protein, 373 aa, Centaurea solstitialis
MEENNAVIVDDIGQQVDDLFTKVEKLEQRVNEIEQFYLNSSNKQSSSSQKSLLVKDKDKVKHIPGYKKHQQEAARREATAAKRMQEIMRQFGSILRQITQHKWAWPFMQPVDVEGLGLRDYYEVIDRPMDFSTIKNLMEAKDGTEYKHVRDICSDVRLVFQNAMKYNDDKSDVHVMAKTLLEKFEEKWLQFLPRVTEEEKRREEEEAEAQLSIQRAQEAAHAKMARDLSNELYEADMHLEHLRETVVQKCRKMSIEDKRNLGIALTQLSPEDLSKALDIVAQHNPSFHSTAIEVDLDIDAQSESTLWRLKYFVKDALQGYGKDDAIIGNEANNGHVSPTKPTNTTRTIASKRKKQICNALARTAKKRNQKLSS

SEQ ID NO: 339 - protein, 374 aa, Gossypium hirsutum
MEAVKVEGFGPDSGVEDLGRCVDEISTTVSRLEQRVNDVEQFYLTTDNMELTITKSASAFKEKVKEKQPTGLEKQQQEASQREAAALKRMQELMRQFATILRQTTQHKWAHPFMHPVDVEGLGLHDYYEIVQKPMDFGTIKSKMEAKDGTGYKNVREIYSDVRLVFKNAMKYNDERHDVHIMAKTLLEKFEEKWLQLLPKVAEEEKRQAEEEAKAELDVKLAQEAVHANMAKELSNELCDVDLQLEKLRQIVIQKCRKMSTEEKKKLGTALTRLSPEDLGKALEIVAENNPGFQPTAQEVDLDIDAQSELTLWRLKVFVQDKLKLAGKCSEAVVCNNINNNENTIKSNSKRRREISDALTKNAIKRNRKLSPNS

SEQ ID NO: 340 - protein, 220 aa, Gossypium raimondii
MEQVMASIPDFEIAETGISKDNSAEAEQFKIRVDEIFQKVDELEQKVNEVEQFNLNSSKKQQSSSKGSSMGKERDKGRQVPSIKKQQQDASRREAAAAKRMQELMRQFGTIVRQITQHKWAWPFMQPVDVKGLGLHDYYEIIEKPMDFSTIKNQMEAKDGTGYKNVRDICADVRLVFNNAMKYNDEGSDVHLMAKTLLEKFEEKWQLLLPKVTERGEKTR

SEQ ID NO: 341 - protein, 374 aa, Gossypium raimondii
MEAVQFEGFGPDSEVEDFGRCVDEISTTVSRLEQRVNDVEQFYLTTDNMELTITKSASAFKEKVKEKQLTGLEKQQQEASQREAAALKRMQELMRQFATILRQITQHKWAHPFMHPVDVEGLGLHDYYEIVQKPMDFGTIKSKMEAKDGTGYKNVREIYSDVRLVFKNAMKYNDERHDVHIMAKTLLEKFEEKWLQLLPKVAEEEKRQVEEEAKAELDVKLAQEAVHANMAKELSNELFDVDLQLEKLRQIVIQKCRKMSTEEKKKLGTALTRLSPEDLGKALEIVAENNPGFQPTAQEVDLDIDAQSELTLWRLKVFVQDKLKLAGKCFEAVVCTNINNNENPIKSNSKRRREIFDALTKNAIKRNRKLFPNS

SEQ ID NO: 342 - protein, 222 aa, Lactuca saligna
METMDGPVPEVRTEGEPAVAEQLGQNVDQIIVKVDELEQRLNEVEQFYSKPGKKQSNTSKASSVMKEKDKDKQITSFKRRQLDASRREAAATKRMQDLMRQFSVLLRQHIIGHKWAGPFMQPVDVVGLGLHDYYEVIEKPMDFSTIKAKMEVKDGTGYNNVREICADVRLIFKNAMKYNDERNDVHVMAKTLLAKFEEKWLQLLPKVDEEDERRKKEKQNHS

SEQ ID NO: 343 - protein, 369 aa, Medicago truncatula
MEPYPQRPSANADRLEGFRNSVDEFRTQVDNLQKQVIEVEHYYESSGIFQGNSSRGGSVVKEKGREKTLAGTKTPLQDALRTETAAGKRMQELMRQFSTILRQATFQITQHKWAWPFLEPVDVEGLGLHDYYEIIDKPMDFGTIKNKMEAKDGTGYKNVREIYADVRLIFKNAMKYNNEKHDVHVMAKTLMEKFEDKWLLLLPKVAEEEKRQIEEEAQVQMDIHLAQETTYADMAKDLSNELNEVGIRLMEFREKVIQNCRKLSTGEKKALGKAIAKLSPENLQRALDLVAEINPSFESTADEVVLDINAQSDYTVWRLYHFVKGALEGQQGTAVNNDTEEKRYSSRKRREFSDDHAKNPSKSRKLSTS

SEQ ID NO: 344 - protein, 359 aa, Medicago truncatula
MSLGKQVNDVEQFYQSTDVQQNDCKYKGREKPPTGSKKALKRASEDMQAEMRHNFNKIFNEASAVKLLAMTNYILLQPLSFSYIYPVLLNSSYSGVEFEHITIIAKDKWAWPFLDPVDVEGLGLYDYYQIIEKPMDFSTIKIRMEAKDGSGYKNVREIYADVRLIFKNAMKYNDEKNDVHVMAKTLLEKFEGCTYRNNSGFSHPMQYFSESDLSKEEAHEELNKRLAQEATYANMTRELSTELSKVDMALRSLKTTAISQCRSVKSHSMNDSLVLHIICHAVIDLNCLAKIRKLSHPEKLILANAFTKLSPDNIVKALEIVKESNPNFKDRIDMVTLDLDSQSDYTLFRLHMFVKNTLE

SEQ ID NO: 345 - protein, 360 aa, Oryza sativa
MVPGGGVPQGAEGGRAMAAAETAATAAAAGERAPGTEVDAFRRQVEDLVSKTDQLERRVNEVVGFYDGKKHGSGGRKAGRKDSSLSKGMPDLMRQFGTIVRQITSHEWAEPFLKPVDVVGLQLDDYYKIITKPMDFSTIQKKMEGKDDNKYNNVREIYSDVRLIFANAMKYNDERHDVHIMAKSLLEKFEEKWLQLLPKVENEERKQKDEESNGVPKVNISPEEAIAKLAKDTDNELIEINKQLEELRQMVVQKCRKMTTYEKRKLGAGLCHLSPEELTKALEMVAQDNPSFEAKGDELELDMDAQSETTLWRLKFFVREALERQANVASGRTDENAKRKREICNALARTASKRVKQQPN

SEQ ID NO: 346 - protein, 360 aa, Oryza sativa; identical to SEQ ID NO: 345

SEQ ID NO: 347 - protein, 517 aa, Physomitrella patents
MVNGKCMLKDMVAVVVSLSFPAFSLEGFLLVLLDARPLSERRSDCISTVTKQGFDVVQRTRDGHITNLPCSEPISEKKALVTQQMKMKPRIGVDGDMAAEPAQCGPVQEGRGARDRDDRVPSPAAVGQNRDSTVEANEVETEVSEAARNLLKQQVQTLTAKVEEIERKIALVTQEKNAESKSKGESGTGLKDRDKGCGTLNKKQQYLLDNNRGDVARSKRNQELMNQIRGIWRQISQHKWAWPFLKPVDVEGLGLHDYNDVIEKPMDLGTIKNKMDAKDTSGYQHVQEVCDDMRLVFSNAMTYNPEGSDVHVMSKTLSDKFEEKWKALIEPKLHFEESKTQQEDNEVQLKEAGMQVVEEIDTKKLTEQYLLQLEELDKQLEDLKRQAAPTCSRAMSIEEKRHLGQNLGKLPPENLSHVIQIIAQRNPSFNINSDEVEVDIDAQDPATLWRLQRYVQAVLSGSGARQTTARNQPTKRSCGYVQNKNSSKRGKKTTTPCHGQLSHVMKYSSIPGFLSHQ

SEQ ID NO: 348 - protein, 403 aa, Physcomitrella patens
MKPRISAESDEATQPAQEGRGARAKDDRPQLPAAVAQTRDSIPGANEDETETSEAAKALLKQQVQALTAEVEEMERKIAEVTQKRNAERKSKGKIGTSVKDRDKGAGAFTKKQQQLLDINRRDTSRSKRMQELMRQVQSIWKQISQHKWAWPFMKPVDVKGLGLHDYYDVIEKPMDLGTIKNKLDVKDGLGYQHVQEVCDDVRLVFSNAMTYNPEGSDVYVMSKTLSDKFEEKWKTLIEPKLQEELKRSHDDSEVQANEGGVPVVEEIDTEKVIEQYALQLEELDKQLEELKQQATPKFSRAMSVEEKRHLGQSLGRLPPDNLSHVIQIIAQKNPSFNINSDEVEVDIDAQDPATLWRLQRYVQAVLSGSAARQATPRSQATKRNGSSLLKKNSSKRSKATTS

SEQ ID NO: 349 - protein, 268 aa, Physcomitrella patens
MTSYIPQISSHKWAWPFMKPVDVKGLGLHDYYEVIEKPMDLGTIKNKMDAKDASGYQHVQEVYQDVRLVFSNAMKYNPEGSDVYVMSKTLSEKFEEKWKTLVEPKLHEEESKKSQEDNEVRTKEPGVQAVEEIDTEELTEQYALQLEELDKQLEDLKQQATPNSRAMSVEERRHLGQSLGRLPPDNLSHVIQIIAQKNPSFNMNSDEVEVDIDAQDPATLWRLQRYVQAVLSGSGGRQATPRNQAAKRNGSSLHSKSSSKRSKKVTVP

SEQ ID NO: 350 - protein, 384 aa, Populus trichocarpa
MEPSVFYFGNLPVRNPDGNDADTEGFKHSVDEIFQKVDKLEQRMNGVEQFYLDISKKQQSGSSKGGGSSIVKDKDKERHVTSIRKQQQDASKREAAAAKRMQELMRQFGTILRQITQHKWAWPFMQPVDVKGLRLHDYYEVIDKPMDFSTIKNQMEAKDGTGYKNVREISADVRLVFKNAMKYNDERSDVHVMAKTLLGKFEEKWLQLLPKVTEEEKRREDEEVEAKLDMQLAQEAAHAKMARDLSNELYEVDMHLEELRDIVVQKCRKMSTEEKRKLGVALTRLSPEDLTKALEIVARSNPGFQATAEEVDLDIDAQTESTLWRLKFLVKDVLEVQGKSAASTGGNNNNNNNNKNTSNNNKRKREICDAIAKTAKKRSKKPSS

SEQ ID NO: 351 - protein, 370 aa, Populus trichocarpa
MEAISPSIVDSGNLPIRNSDAEAEGFKHSVDEILQKVDKLEQRVNEVEQFYSKNTSKKQQSGSSKGGSSTVKDKDKERHIPTAAKRMQELMRQFGTILRQITQHKWAWPFMQPVDVKGLGLHDYYEVIDKPMDFSTIKNQMEAKDGTGYKSVREICADVRLVFKNAMKYNDERSDVHVMAKTLLGKFEEKWLQFLPKVTEEEKRREEEEAEAQLDMQLAQEAAHAKMARDLGNELYEVDMHLEELREMVVQKCRKMSTEEKRKLGAALTRLSPEDLTKALEIVAQNNPGFQATAEEVDLDIDAQSETTLWRLKFFVKDALEVQGKSAASAGGRNNTTTPSNNNNNNNKRKREICDAIAKTAKKRSKKPSS

SEQ ID NO: 352 - protein, 377 aa, Populus trichocarpa
MEHMIRSIRGSRNVGTGNIEVDNSEMEFEQRVDAVERYYADNKELNTAKCSSILKDKIKKKHLMTVEKQQQDSEKITQDLMRQFAVIFRQIAQHKWAWPFLEPVDVEGLCLHDYYEVIEKPMDFRTIKNRMEAKDGTGYKNVREIYADVRLVFKNAMKYNDERDDVHVMARTLLEKFEEKWLQLLPKVAEEEKRREKEQTATQVATKLAEESSYANMAQDLSNELHGVDMQLERIREMVVRNSRKISTEEKKKLGTALTQLSHQDLIRALEIVAEHNPSFQATAQEVNLDMDTQSDVTLWRLKVFVQDALKVSGRNSGGTGMGCNSNINNDDNKAKININNKNRNTTASKRKGERCDAVTKASAKRTKKISLNSLNP

SEQ ID NO: 353 - protein, 346 aa, Sorghum bicolor
MTPANGAPAPAAESVPPEVESEADAFRRQVDDLVSKTDVLEKRVKEVVDFYDGKKHGSGGRKGGGGGRHGAYSRGMPDLMRQFGVLLKEITSHKDAWPFLKPVDVVTLHIPDYHKIITQPMDFSTIQKKMERKDGTCYTNVREICSDVRLIFANAMKYNDDQNVVHLMAKSLLEKFEEKWLHFLPKVESEEKRQKEEESKGVAATNTSREVAIAKLAKDTDDELNQINRKLEELRKMVVHRCRKMTTDEKRKLGAGICHLSPDDLNKALEIVAQDNPSFQTKAEEVDLDMDAQSETTLWRLKFFVREALERQANVASGKMDENAKRKREICNALAKTASKRIKKQP

SEQ ID NO: 354 - protein, 351 aa, Triticum aestivum
MEGAWPHPAPMEPTTAADGPQVSEVNSFRRQVDDLLSKTDVLEKRVNEVVGFYNSKKHSSGGRKAGGRYAENGARDSHGNGMPDLMRQFAGIIRQITSHEWAQPFLQPVDVVGLQLDDYHQIITKPMDFSTIRNKMEGKESTTYNSVREIYSDVRLVFTNAMKYNVQGHPVHIMAKFLLERFEEKWLHLLPKVENEEREREEPNDAPTISISPEAAIAILAEDTGNELNEINKQLEELQKMVVQRCRKMTTDEKRKLGAGLCQLSPEDLNKALELVAQDNPSFQTTAEEVDLDMDAQSETTLWRLKFFVREALEQQANVGVVACGKIDENTKRSRDMYNALAKTVSKRIKK

SEQ ID NO: 355 - protein, 438 aa, Vitis vinifera
MAFRIALSPSVITERGFLLFIASRKVSKTHKTERLTNRPQCFHKEDRETRPPLECLVSDEPMDASITNVRNVEIGKHKGNTDQVEGFKSCVDDIFTKVDKLEQRVNEVELFYLTASKRQLNGYKGSSVLKDKERHVASAKKQQQDASRREAAAVKRMQELMRQFGTILRQIMQHKWAGPFLHPVDVEGLGLHDYYEVIDKPMDFSTIKNQMEAKDGTGYKNVREICADVRLVFKNAMKYNDERHDVHVMAKTLLGKFEEKWLQLLPKVAEEEKRREEEEAEAQLDMQLAQEAAHAKMAREISNELYDIDMHLEEVREMVIRKCRKMSTEEKRKLGAALSRLSAEDLSKALEIVAQNNPSFQATAEEVDLDIDAQTESTLWRLKFFVKDALEVQGKSSASKGDNTNTTTTATNNNKRKKEICDAIAKTAKKKSKKLPLD

SEQ ID NO: 356 - protein, 284 aa, Vitis vinifera
MALWHISLMSLRFYWQIMQHKWAGPFLHPVDVEGLGLHDYYEVIDKPMDFSTIKNQMEAKDGTGYKNVREICADVRLVFKNAMKYNDERHDVHVMAKTLLGKFEEKWLQLLPKVAEEEKRREEEEAEAQLDMQLAQEAAHAKMAREISNELYDIDMHLEEVREMVIRKCRKMSTEEKRKLGAALSRLSAEDLSKALEIVAQNNPSFQATAEEVDLDIDAQTESTLWRLKFFVKDALEVQGKSSASKGDNTNTTTTATNNNKRKKEICDAIAKTAKKKSKKLPLD

SEQ ID NO: 357 - protein, 360 aa, Zea mays
MTPANGAPARAAEAGPHEVESEADAFRRQVDDLVSKTDVLERRVKEVADFYDGKKHGSGGRKGGGGGRYGASSRGMPDLMRQFGVLLKEITSHKDAWPFLEPVDVVTLQLPDYHNIITQPMDFSTIQKKMERKDGTCYTNVREICSDVRLIFANAMKYNDDQNVIHLMAKSLLEKFEEKWLHFLPKVESEEKRQKEEESKGVAATNTSREVAIVKLAKDTDDELNQINKKLEELRKMVVHRCRKMTTDEKRKLGAGICHLSPDDLSKALEIVAQDNPSFQTKAEEVDLDMDAQSETTLWRLKFFVREALERQGHVASGKMDYNAQGKEGDMQCSGQNHLETDQEAALAIFPYHHSRPLIV

SEQ ID NO: 358 - DNA, 677 bp, Oryza sativa
ttgtacaaaaaagcaggcttaaacaatggcgctcaccaaccacatcctcgcgccggcagccgcagcagcctgctgcttcggacggcgggttcctctgccgccgcctcatcagctcgccgtgcggaggaagcaaaagagcgtggtggtggccatggccgacctgctgggcgactttggcgcgcgcgaccccttcccggaggagatcgagagcaacttcggcgagagggtgctgggcaacgtcgacaccctccacaacatcctcatccccacgctctccgtgctctccatcgcgcgcctccccctcgagcctaaccccgcgcccgtcgacgctgccgacgcccgccgcctcctccacaaggtggttggctggcgcctcctcgacgacgccgacggcatgcgtctgcagtgcgtctggaaggtcagggacgaagcctgcggccacgagctcgtcgccaggatcaacgccgcggttgacggcgccccggccaccgtcgtcttcgaggcccccaaccaggtcagggccgagctgcagacgccctccgccggcggcctcaccgtcaatgacttcatcgtcgcggctcgcatagacaaggtcaagacggtcgaccttatccccaagaagagagtctgggcctgattcttcattcacatatatccccttacccagctttcttgta

SEQ ID NO: 359 - protein, 203 aa, Oryza sativa
MALTNHILAPAAAAACCFGRRVPLPPPHQLAVRRKQKSVVVAMADLLGDFGARDPFPEEIESNFGERVLGNVDTLHNILIPTLSVLSIARLPLEPNPAPVDAADARRLLHKVVGWRLLDDADGMRLQCVWKVRDEACGHELVARINAAVDGAPATVVFEAPNQVRAELQTPSAGGLTVNDFIVAARIDKVKTVDLIPKKRVWA

SEQ ID NO: 360 - DNA, 753 bp, Allium cepa
cacagcggctgctcgtcttttgtcattctccgaagcgaagccgtctactcaattaaccgcatcgtttctcgttagtaactatggacgtttgtgttcacgtatgttcaagattaatcgcaaaagcaatgatgtgcattcacacatgaggttacgctgtgcatttagttccctttcttcatcccaagatttgacaagcaaaaaatgtgtgccatgcaactcaaaagatattcagccaatatctgaacaatcagcaaatgaactactctcaaaggtgcaaggttgggaaatgtcaaatgatgttggggtaatgaagctgcatcgttcttggaaagtcaagagtttcatgaaaggccttgattttttcaagcttgttgctgatgtggctgaggcagaaggtcaccatccagatcttcatcttgttggatggaataacgtgaaaattgatatatggacccattcagttggaggtctgactgaaaacgattttatcctagctgcaaagatcaactctcttgaaatagagcatctactaagcaagaaggggagaaaatgactgctcttctgcagtttgaaatcaatctgaagcaaatcttcttctttttttggtgtttgtgctgtttgccttctcgttatatgctatgctgcatgatcaaaagtagttgtgtttaaaagttaggtcattttgttttgatagttaaatcaaaatttatatttgagcataaagatgaactactagctgtggtacatgcttgg

SEQ ID NO: 361 - protein, 150 aa, Allium cepa
MFKINRKSNDVHSHMRLRCAFSSLSSSQDLTSKKCVPCNSKDIQPISEQSANELLSKVQGWEMSNDVGVMKLHRSWKVKSFMKGLDFFKLVADVAEAEGHHPDLHLVGWNNVKIDIWTHSVGGLTENDFILAAKINSLEIEHLLSKKGRK

SEQ ID NO: 362 - DNA, 896 bp, Arabidopsis thaliana
aaacttaagaaattttgtcatttaacccctcactttcacgattagtaagtattacaaaactctccccggaaatttctgctccgcaacggcttcggcaccaatgagtcggctcttgctacctaaacttttctcaatctctagaacacaggttccagctgcatcattgttcaataatctgtacagacgtcacaaacgttttgttcattggacgagtaagatgtcaacagatagtgttagatcatccacaactggtggttctgcttctggagctagaacattttgctccctcgcagatttatcaaccaaaaagtgtgtgccatgcaatgcgaaggatctgcgcgccatgaccgaacaaagtgcccaagacctacttcaaaaggttgctggatgggatttggccaatgacaatgatacattaaagctgcatcggtcatggagggtgaaaagttttacaaaggggctagatttcttccaacgtgtagctgatatcgctgaatcagaaggtcatcacccagatttgcatctggtcggctggaataatgtgaaaattgagatatggacacatgcgataggtggtttgacagaaaacgacttcattcttgctgctaagatcaacgagctccaagtggaagatcttctgaggaagaagaaagttgctaagtgaaatggaatcaagatgaattctgcaagctaaagaaacatctttaaagactggctcagaggtcaatatgaataagcatcttgaagccataactgggatgtgttggtcttaaaactctttgaagcatgccacacaagctttagatctatgtaagatgagaacaaaatgacagagagagtaatgtttcttttgtgtcttatggttcttgtaaagctgtttctagtcttacaatctc

SEQ ID NO: 363 - protein, 187 aa, Arabidopsis thaliana
MSRLLLPKLFSISRTQVPAASLFNNLYRRHKRFVHWTSKMSTDSVRSSTTGGSASGARTFCSLADLSTKKCVPCNAKDLRAMTEQSAQDLLQKVAGWDLANDNDTLKLHRSWRVKSFTKGLDFFQRVADIAESEGHHPDLHLVGWNNVKIEIWTHAIGGLTENDFILAAKINELQVEDLLRKKKVAK

SEQ ID NO: 364 - DNA, 931 bp, Arabidopsis thaliana
aactcagtccagtggtctgaaaatcgtttcgctctctaaaaaccaaaactcttatcttcggtacagagcaaatcacagctcccgatggccgccacgtcatcatcaccgccgtgtaacatctccgcgtcctccctcctcctccgtcaaccttctcgctcaatccttaaagtgttcggtttattaccacctgtaagtaggaataaccgtaaactcggccggttaacggtgacccggtctaatctggcgcaggattttcttggtgacttcggagctcgtgacccttacccggaggagatagcgagtcaattcggagataaagtgttgggatgccaaagcactgagcacaagattttgataccaaacgcatctgttttgtctctctcccagcttcagtgttcccctgtttcgtcttcacagcctcctttgtccggcgatgatgccagaactctcctccacaaggttttgggatggagtatagtggataatgaagcgggtggtctgaaaataaggtgtatgtggaaagtgagggattttgggtgcggtgttgaactcataaacaggatccataaggttgctgaagcttctggtcattacccttctcttcacttggaaagtcctacccaagttcgagctgaactatttacctcttctatcggagggttgagcatgaatgatttcataatggcggctaaaatagatgatatcaagacttctgatctttcccctaggaaaagagcttgggcgtgatcttcttttcattattttggaacatttttgtttgatagtatgtaatgtatgtgatgtattctaaattgtgtgtgatcggtctacatgtcgagttatatagaaagcattgtcataaccgcataagagatatcacgcaacatgtctttgagattcattcatcaatcaaaagaagaaagaacatcaa

SEQ ID NO: 365 - protein, 220 aa, Arabidopsis thaliana
MAATSSSPPCNISASSLLLRQPSRSILKVFGLLPPVSRNNRKLGRLTVTRSNLAQDFLGDFGARDPYPEEIASQFGDKVLGCQSTEHKILIPNASVLSLSQLQCSPVSSSQPPLSGDDARTLLHKVLGWSIVDNEAGGLKIRCMWKVRDFGCGVELINRIHKVAEASGHYPSLHLESPTQVRAELFTSSIGGLSMNDFIMAAKIDDIKTSDLSPRKRAWA

SEQ ID NO: 366 - DNA, 896 bp, Arabidopsis thaliana; identical to SEQ ID NO: 362

SEQ ID NO: 367 - protein, 187 aa, Arabidopsis thaliana; identical to SEQ ID NO: 363

SEQ ID NO: 368 - DNA, 931 bp, Arabidopsis thaliana; identical to SEQ ID NO: 364

SEQ ID NO: 369 - protein, 220 aa, Arabidopsis thaliana; identical to SEQ ID NO: 365

SEQ ID NO: 370 - DNA, 576 bp, Hordeum vulgare
cggcacgaggggccctaaaggcctaacatggcgggtctgctactgcgtaggttcatgcggatccagccccgtgcgccgatgaccgccgccggtggagccgcgttcttcaacgcctcgtgcccctcgtccccccgcaccgtcgcgcacctggaggtgagcggggagcaggcctctcctaaagttgaattatcagagaagagttgtatcccatgcaattcaatggatctacatgctatgtcagaagattctgctaaaaagtcacttgaacaggtgactggttgggaactgaaaaatgaaggtgacattttgaaattacacagagcatggaaggtgaagaattttgtaaaagggcttgagttctttcagcttgttgctgctgttgctgaggaagaaggtcaccacccagatcttcatctcgtgagttggaacaatgtgaaaattgatgtctggactcattcagtcagaggtttaacagataatgacttcatccttgctgcaaagatcaatgaactcaagctagaaggtcttttgagcaagaaaaaagctaccacccatgagtagctttgggagatcaag

SEQ ID NO: 371 - protein, 177 aa, Hordeum vulgare
MAGLLLRRFMRIQPRAPMTAAGGAAFFNASCPSSPRTVAHLEVSGEQASPKVELSEKSCIPCNSMDLHAMSEDSAKKSLEQVTGWELKNEGDILKLHRAWKVKNFVKGLEFFQLVAAVAEEEGHHPDLHLVSWNNVKIDVWTHSVRGLTDNDFILAAKINELKLEGLLSKKKATTHE

SEQ ID NO: 372 - DNA, 932 bp, Hordeum vulgare
  misc_feature (873)..(873): n is a, c, g, or t
  misc_feature (917)..(917): n is a, c, g, or t
cggcacgagggtccgtccgtccagctgcgcatcatccatccgtcccactgcaccaccatggcgctcatgctcagcccggccgcgaccttcttccccgtcgccggcaagccctccgccgccgccacgaggagcctcctcttcaccaccagcagcagcagcagcagcaagggaagaggcggtcgcgggaaggtggtggcgatggcggacatcctgggggacttcggggcgcgggacccgttcccggaggagatcgcgagcaacttcggggagaagacgctgggcaacgtggacacgctgcaccgcatcctcatccccacgctctccgtgctctcgctctcccgcgtgccgctcgacgcccacccggcgccgctctctgaggaggacgcccgcaggctgctcttcaaggtggtcggctggcgcctcctcttccccaccaagggcgactccgacgtgctcaagctcgagtgcgtctggaaggtccgggaccaggcctgcggcgacgagctcgtcgccaggatcaacaaggccctcgacggcgccggccacgcccccgccgcgctcagcttcgagccgcccaaccaagtcagggcccagctctacaccccgtccgtaggtgggctgagcgccaacgacttcatcatcgccgccaggatcgaccagatcaacaccaaagatcttctccccaagaagagggtctgggcatgctgatgactgcccatgccgtcttgttcctcttcctttgcatgcatacagggacagttttgtttcatggaaatggaatggaagccatcctatccatgcttgtagctctacccatagtgtttaagacgatgatgccatcaaatcaaatcaaatgatttcctcaacttgttncttcccggttcttcccaatacgaggcacgattacgccaacactnctataattacaaaat

SEQ ID NO: 373 - protein, 216 aa, Hordeum vulgare
MALMLSPAATFFPVAGKPSAAATRSLLFTTSSSSSSKGRGGRGKVVAMADILGDFGARDPFPEEIASNFGEKTLGNVDTLHRILIPTLSVLSLSRVPLDAHPAPLSEEDARRLLFKVVGWRLLFPTKGDSDVLKLECVWKVRDQACGDELVARINKALDGAGHAPAALSFEPPNQVRAQLYTPSVGGLSANDFIIAARIDQINTKDLLPKKRVWAC

SEQ ID NO: 374 - DNA, 851 bp, Hordeum vulgare
tcggcacgaggcctcgtgccgaattcggcacgaggcaaaggcctcaacatggcgggtctgctactgcgtaggttcatgcggatccagccccgtgcgccgatgaccgccgccggtggagccgcgttcttcaacgcctcgtgcccctcgtccccccgcaccgtcgcgcacctggaggtgagcggggagcaggcctctcctaaagttgaattatcagagaagagttgtatcccatgcaattcaatggatctacatgctatgtcagaagattctgctaaaaagtcacttgaacaggtgactggttgggaactgaaaaatgaaggtgacattttgaaattacacagagcatggaaggtgaagaattttgtaaaagggcttgagttctttcagcttgttgctgctgttgctgaggaagaaggtcaccacccagatcttcatctcgtgagttggaacaatgtgaaaattgatgtctggactcattcagtcagaggtttaacagataatgacttcatccttgctgcaaagatcaatgaactcaagctagaaggccttttgagcaagaaaaaggctaccacccatgagtagctttgggagatcaagcaaataacccatgtttgcatgttctctatttgaacttttaatgtgtagaccccaagaaatgtccttttgtattttctgtgatgattgtacatgcctgtgagttctacttgacctgtgttgagatctatccgtcctgggtgaagcgtttctcccatcatttgaatctgggtcaccctaatacttgtctgtatttctgaatatattcagtagtttgaaggtgctatgtatgcaatggcacagatatatgatcatct

SEQ ID NO: 375 - protein, 177 aa, Hordeum vulgare; identical to SEQ ID NO: 371

SEQ ID NO: 376 - DNA, 902 bp, Medicago truncatula
  misc_feature (902)..(902): n is a, c, g, or t
cggccggggacatccatttccattgaacttcacaatccacacaacccaataaacaaacaccaagcaaacaaagaggaagaagtatacactatccagtagtattagtgtgtataataaatcaatggctacaaccaagcttgtattattatccttccctgcagtgcatgtaaactcaaccactaccaaaatcaacccttcattcaatttccaacatcaccgtacaagtactccaaatgggttctctccacttcggtccttagccaacgatttcttgggggattttggagcaagagaccctttcccagctgagttggaaagtcaatttggagagaaagttattggtagttataacactgaacacaaaatccttatcccaaatatttcagctctttctctttctcaacaggagtgtacccccatttcacctttacagaaccccctttctcaagatgatgctaaccagcttataagaaaggttttgggttggagacttgtgaatgatgaaggaatacttaaacttcgatgcttgtggaaattgaaagattttaaatgcggagttgaactcattaacagaatctctacagttgtagagactgcaggacatttccccaatatccacatagaacaaccaaatctagtcagagcagaactatggacaacatccattggtggattaagtatgaatgatttcattgtagctgcaaagatagatgcaataaagacatcagatcttatcccaaggaaaagagcttgggcttaatgctccatgagctccaatccataaagtattttgttatgaatttttgttcaacaaagagttaccactaatttgtgttatttgatgaaatgtattattctttgttctcattttaagtgttcttgcttctacctgaagtctgttn

SEQ ID NO: 377 - protein, 212 aa, Medicago truncatula
MATTKLVLLSFPAVHVNSTTTKINPSFNFQHHRTSTPNGFSPLRSLANDFLGDFGARDPFPAELESQFGEKVIGSYNTEHKILIPNISALSLSQQECTPISPLQNPLSQDDANQLIRKVLGWRLVNDEGILKLRCLWKLKDFKCGVELINRISTVVETAGHFPNIHIEQPNLVRAELWTTSIGGLSMNDFIVAAKIDAIKTSDLIPRKRAWA

SEQ ID NO: 378 - DNA, 2745 bp, Oryza sativa
aaatgtaactagtctcttcttaccggaatccccacaccttctcgccacggtccgacgcgcaagcgcggcggcgctcgctctcgcggttctcggtgacggcggcctcgtcccactcccgcccggggatgaacggcaccccgttgcgttgccatctctagtcgcgcatgaccacccgcgccggcgcacctctcgccgtcttcctcgtctcgtccctcaagtcggccgccgcacgcctcagccacggcgagcagctccacgcgctcgctgccaagtcgggcctgctcacctccaatcttttcgtccgcaactccctcctcgccttctactcccgcgtcgcccccagcctcgcctaccacctgttcgatgaaatacccccgctcctccgcgacgccaccgcccacaacattctcctctccgcgctcgcccgcgcgggccgcctcgaacgcgcgcagtgcctgctcgcggagatgcctcagagggacgcggtctcgttcaccactgtcatttccgccctctcgcgctccggtcatcctgagcgcgccctggccgtcttccgcgatatgctcaccgaggccgtgcagcccaacgaggttacacttgcggaagtgctcacggcgatggcctgtgaccacggggcaccagcaccagttggtgctgcccatggcgttgccgtgcggcgtgggcttgatggatttgtcatcgtggccaccaacctggtccatgcatatggagcagtgtcacaggttccttctgcccgttccatattcgagctaatgccagatagaaacactgtcacttggaatacaatgcttaattgctatgtcaaggcaggaatgattaacatggctgctgaggtgttcggtgtgatcccagagagggatgaggtctcttggttgacaatgatagatggatatatgtgtgcggatttcctactgcaggctctcaggacatatgttgcgatggtgggtacggtgggcataagggccaatgaggtgatacttgttggtttggtcaaggcatgttctcgacattccgctgtctcagaagggcaacaactccacacagtcattctaaagaatggttttgacgctcatgcatttgtacaggctaccctgatccattattacgggtcttgtgattttattgaccatgcccagatgcaattcaaattgtcagacaagtcacacgtagcttcctggaatgcccttatggctagcctactaagaaggaatctagtgcatgaagcaaggcagctgttcgatgacatgcctgagagggacaccatttcttggagtacattgatatctgggtatgtccagagtgggaattcaaacatggctttgcagatattctgttcgatgctagatgctggtgttgaacctaatgagatcactttagcaagtgctctgtctgcagtagccaattctggcaccttggggcaagcaagatggatccatgactacataatcagcagatcaatccagcttactgataaactgagcgctggactgattaacgtgtatgcaaagtgtggtagcattgctgaagcagttcagctatttaaccatgttaaggataagtcaatttcagtgtctccttggaattctatcatctgtaatttagctatccatggctatgtgaacatgtcgctggaattgttttcacagttgcaaagcaccacccatattaaacccaactcaatcacataccttggtgtgttaaatgcatgttgtcatgctgggatggtagctgaggggaagcgccaatttgagtccatgaggcaacaatatggaatccaaccagaaattaagcactatggttgcatggtcgatcttctttgtcgagctgggtatttggaagaagcagaactgcttattaagacgatgccaatgaaagctgatgtggtagcctggggttgtatccttgcagctgcaaggactcaaggaaatgtagccttaggagaaaaggctgcagaagaattgtcaaagcttgacccaagccatggagcatccaaaatagccttgtcaaacctctatgctgatgctggtcattggagcaatgtgtcagtggtgaggaaggaactccagaatgagaatttggaaagacttacaggaagcagtggaattctacaattataggttttagaaatatagctccctcaaggaacaataattcttatagactttgacacagtagggcatatttcggtcttcagcttcacatatgaacattaggttacaagaaactcaattgtcagcaaataaaatatccaaactattgtcaacaagacagagatgatattttcaattattatggaattttttgcaatttgaaatcttggccggttattatcagagaatatatgggcaagtgcttctcctgaatgtgatgcatgcatgtatggtttaattccagttttactttgcctcctggctcctggcgtagcagcagtacattttctatggaagataaagcttgagaacaaaattaatatgctgtgatgctggatggaagatcacatgatcaagttggcagcatagaggtgacgtacagaggcaaggaagtcggaggcgctgtgcatatgcaacgttttcatttctatgttaattttcattgttttggttaataccatgtgatctctaatctaattagtgtgggaccaagccaaagaccaggcaccctatatatgggtctaggccgattggaaacagacaatacacaatcaatcgatacaaaattcctgtc

SEQ ID NO: 379 - protein, 657 aa, Oryza sativa
MTTRAGAPLAVFLVSSLKSAAARLSHGEQLHALAAKSGLLTSNLFVRNSLLAFYSRVAPSLAYHLFDEIPPLLRDATAHNILLSALARAGRLERAQCLLAEMPQRDAVSFTTVISALSRSGHPERALAVFRDMLTEAVQPNEVTLAEVLTAMACDHGAPAPVGAAHGVAVRRGLDGFVIVATNLVHAYGAVSQVPSARSIFELMPDRNTVTWNTMLNCYVKAGMINMAAEVFGVIPERDEVSWLTMIDGYMCADFLLQALRTYVAMVGTVGIRANEVILVGLVKACSRHSAVSEGQQLHTVILKNGFDAHAFVQATLIHYYGSCDFIDHAQMQFKLSDKSHVASWNALMASLLRRNLVHEARQLFDDMPERDTISWSTLISGYVQSGNSNMALQIFCSMLDAGVEPNEITLASALSAVANSGTLGQARWIHDYIISRSIQLTDKLSAGLINVYAKCGSIAEAVQLFNHVKDKSISVSPWNSIICNLAIHGYVNMSLELFSQLQSTTHIKPNSITYLGVLNACCHAGMVAEGKRQFESMRQQYGIQPEIKHYGCMVDLLCRAGYLEEAELLIKTMPMKADVVAWGCILAAARTQGNVALGEKAAEELSKLDPSHGASKIALSNLYADAGHWSNVSVVRKELQNENLERLTGSSGILQL

SEQ ID NO: 380 - DNA, 956 bp, Oryza sativa
acgccaggcaaacccacacgccgccttcccgccgcctccgctcttcttcccccaaccgcgtcgcaagcccacggcgagcgccgccgccgtcccaccgtcgccgatgacccgcggcgtcgctatggcgcacgcgaggctcctcctggcgcgctactacgcgatggcggcccccagttggcctaccgtatccaagaaccttccgctgctgggccatggacgttctcatcatccgatgtatgcaagtcaagacgagattaaaatgtcaagtagaagatggtgccatggttctcctgacaatcaagagctggcaaagaagatttgtgttccatgcaattctaaggatatacatgccatgccagaagattctgctaagaagatgctagaacaggtgggtggttgggaattagcaaccgaaggtgacattctgaaattgcacagagcatggaaggtgaagaattttgtaaaagggcttgaattccttcagcttgttgctgctgttgctgaggaagaaggccaccaccctgatcttcatcttgtcggttggaacaatgtgaaaattgatgtttggactcactctgtcagaggcttaactgacaatgatttcatccttgctgcgaagatcaataacctcaacttagaaggcctcttaagcaagaaagctacagtccaaaagtagttcgcgcagatgaagcgattgatttctgacgagatttatgtacttgcttcggttagaatgcgtgagttgaggtatctttaacttgataagcttttcttgaatttgtaccgggagtttctctgttctttctaaattttaccaatgctgttggaccgggtctacttctgttacagaatgtcgagaaccaccataatctagatttgatcaaggagaacctgtttctcttacatgtgggccaagagatgtagggtccacgaacattttagagtccaccacacct

SEQ ID NO: 381 - protein, 190 aa, Oryza sativa
MTRGVAMAHARLLLARYYAMAAPSWPTVSKNLPLLGHGRSHHPMYASQDEIKMSSRRWCHGSPDNQELAKKICVPCNSKDIHAMPEDSAKKMLEQVGGWELATEGDILKLHRAWKVKNFVKGLEFLQLVAAVAEEEGHHPDLHLVGWNNVKIDVWTHSVRGLTDNDFILAAKINNLNLEGLLSKKATVQK

SEQ ID NO: 382 - DNA, 2009 bp, Populus trichocarpa
  misc_feature (610)..(610): n is a, c, g, or t
atggcaaataagctcaaagtagacgagcttcgagccgaactcgctaaacgtggactcgataccaccggaaccaagccttccctggtgcggagactggaatcggcactcgagcaagaaaacaagcagtcagaagtggactcggtcgatggtggaggtagtagtaacaacaaaagagaaagggagtctgaagatggaggaggagattctaataacgggacagagaaaatcaaggctattgaaaagtttcgggacatgaatgttaagcaattacgcgaacaggccagtctccttggagtttccactgccggaaccaagagacaattaattgacaggctctgcaacgctgaaccagacaatcaccattcacttcaaccaaaagaagaagagcaggaacagggtgaaaaggaaaaggataaaattgtaactgctacgaaaaagggcgcggcggtgctagatcagtttctttctgatcagataaagtcagagtatcatgttttgcaaataggtgatgatgtctatgatgccatgctgaatcagacaaatgttggggacaacaataacaagttctatgtgattcaacttcttggcaagctttcacttccgcccatgngatatatggtctataacagatggggtagggttggggtgaatggtcaagttaagctatttggtccctacacttcacgagatcctgctgtttctgagtttgaacggaagttctacgccaagacaaagaacgattggtccaagcgaaaggagttcatatgttacccaaagtgctatgctttgttggaaatggactacagtgagcaggaaaaggagccagttgttaaagaaaagcctgactctgctatagcaattcaacctcgggagacacaacttgagtcacgtattgccaaatttatctctcttatatgtaatgttagtatgatgaagcagcaaatgatggaaataggatacaatgcaaataaattgccacttggtaaattaagcaagtcaactatattaaagggttatgatgttttgaagaggatttctgatgtaattggaacagcagatatgttaaaacttgaacaactaagcggagaattttacactgtcattcctcatgattttggatttaaaaaaatgcgagagtttgttattgatactcctcagaagttaaaatgcaagctggaaatggttgaagccctaggcgagattcaagttgcaacaaagttgttggaggatgaacctggaatgcaggaagatcccctgtattctcattacaaccggctacgttgtgaattgactccagttgaagttgattctgaggactttgcaatgattgccatgtatttgcagaatacgcatgcaaaaacacattcacagtatactgttgatattgctcaaatattcaaggtctcaagagaggatgaaaatgaaagcttcagaaagttctctaacacaaaaaatagaatgcttttatggcatggctcgcgcctcacaaactggactggcattctatcccaaggcttgcgtattgctccccctgaagcaccagtaactggttacatgtttggaaagggagtttactttgctgacatgttctccaaaagtgcaaattattgctatgcaaatcatgctgctccagctggtgtgctgcttctgtgtgaggttgctcttggagacatggctgaactattatatgcaaactatgatgctgataagttgccatcggggaagctaagcacgaaaggagttggtagaactgctccagatctttcagatgccagggcactggaggatggtgttgttgttccccttgggaagcccaaagagcagcgaggctcaaagggtgctttgctgtacaatgagtacatagtctacaacgtgggtcagattaggatgcgatatgtagttcaagtgaattttaattacaagcattaatagcgtcagtttgatcttgtgtttttgttctcagatttgttcggctatgtatcatcctttacaggtcttctagttgcaaa

SEQ ID NO: 383 - protein, 642 aa, Populus trichocarpa
  misc_feature (204)..(204): Xaa can be any naturally occurring amino acid
MANKLKVDELRAELAKRGLDTTGTKPSLVRRLESALEQENKQSEVDSVDGGGSSNNKRERESEDGGGDSNNGTEKIKAIEKFRDMNVKQLREQASLLGVSTAGTKRQLIDRLCNAEPDNHHSLQPKEEEQEQGEKEKDKIVTATKKGAAVLDQFLSDQIKSEYHVLQIGDDVYDAMLNQTNVGDNNNKFYVIQLLGKLSLPPMXYMVYNRWGRVGVNGQVKLFGPYTSRDPAVSEFERKFYAKTKNDWSKRKEFICYPKCYALLEMDYSEQEKEPVVKEKPDSAIAIQPRETQLESRIAKFISLICNVSMMKQQMMEIGYNANKLPLGKLSKSTILKGYDVLKRISDVIGTADMLKLEQLSGEFYTVIPHDFGFKKMREFVIDTPQKLKCKLEMVEALGEIQVATKLLEDEPGMQEDPLYSHYNRLRCELTPVEVDSEDFAMIAMYLQNTHAKTHSQYTVDIAQIFKVSREDENESFRKFSNTKNRMLLWHGSRLTNWTGILSQGLRIAPPEAPVTGYMFGKGVYFADMFSKSANYCYANHAAPAGVLLLCEVALGDMAELLYANYDADKLPSGKLSTKGVGRTAPDLSDARALEDGVVVPLGKPKEQRGSKGALLYNEYIVYNVGQIRMRYVVQVNFNYKH

SEQ ID NO: 384 - DNA, 755 bp, Populus trichocarpa
cgttatcaccaccagtcacagtaaaccaccatgggtaccaccgccacaaccaccactcgcttcccattctccctcccaccccctaaatcctatcctccacacaaccaccaccactccaaagtctccatcttgactcccactataacccccactttgagactccaagctatgggagctggcgacaagttaggtgaatttggtgctagagacccttttcctgctgaaatagaaagtgggtttgctgagaaagtgttaggaaatggtaatactgaacataagattctcattcctactgtttctgctctttctctttctcagcaagagtgtactcctatatctcctttgcaagatcccatgtctaaagatgatgctcaaaaactgttaaagaaggttctaggctggagactcctggatgaagaaggtggactgaaactgcaatgcttgtggaagttgagagattttaaatgtggggttgagcttgtcaatagaatttacaaagctacagaatcatgtggccatttcccaaatgtgcacttggaacagcccaatcaagttagagctgaactatggactgcatcccttggtggcttgagtttgaatgatttcattgtcgcggccaagattgatgagattaagacatctgaccttgtccctaaaaaaagagtctgggcatagttggatttttcttgtaagctttcctgaaggaacctgagagatcggtctcttaataagttggtgtttcagaatccaacaac

SEQ ID NO: 385 - protein, 214 aa, Populus trichocarpa
MGTTATTTTRFPFSLPPPKSYPPHNHHHSKVSILTPTITPTLRLQAMGAGDKLGEFGARDPFPAEIESGFAEKVLGNGNTEHKILIPTVSALSLSQQECTPISPLQDPMSKDDAQKLLKKVLGWRLLDEEGGLKLQCLWKLRDFKCGVELVNRIYKATESCGHFPNVHLEQPNQVRAELWTASLGGLSLNDFIVAAKIDEIKTSDLVPKKRVWA

SEQ ID NO: 386 - DNA, 524 bp, Populus trichocarpa
ctctgtctgatatcctatctggaggtcatcatggaagttttgcttcctatgatagatttggctgcaaagaagtgtgtgccatgcaactcgaaggatctacaagccatgactgaagaaagtgcaaatgaccttctatcgaaggttgctgggtggaatttggtgaatgaaaatggtacactaaagctgaatcgttcatggaaagtaaagagtttcactaaagggctggaactattcaagcttgttgggaatgttgctgaagcagaagtaacagtatatgcaaatgcaggtcaccatccggatcttcatctggttggatggaacaatataacaatcgagatatggactcatgcagtgggtggactaacggaaaacgacttcatacttgctgctaagataaatgggcttaacctgcaccacctactgaggaagaaggctgctgcttgacttgtaaatacaattagacttcagtttttggttaatagtcttatccaaaggtatgaggaaagacttttttttttctctcc

SEQ ID NO: 387 - protein, 137 aa, Populus trichocarpa
MEVLLPMIDLAAKKCVPCNSKDLQAMTEESANDLLSKVAGWNLVNENGTLKLNRSWKVKSFTKGLELFKLVGNVAEAEVTVYANAGHHPDLHLVGWNNITIEIWTHAVGGLTENDFILAAKINGLNLHHLLRKKAAA

SEQ ID NO: 388 - DNA, 483 bp, Solanum lycopersicum
attcgaacgcttcaagctcatatcgtttacatcactctcccaaaccttgtacagaaacaatggaagctcaaatacacatgtagctggaactggggtaatgtgcagtaatcttgcagtgtcagcaaaaactaacactcattacgggattaagactttgtcttcagcagcagttttgtcaactaagaagtgtgtaccatgcaacacaaaggatttgaggcctatgactgaagaagctgcctatcagttgatgccacaggtgtcggggtgggatttggtgaatgatggtggcacactgaagctgcataagtcctggaaggtcaagactttcaccaaaggattggagttctttcaagaggtggcgagtgttgcagaagctgaaggtcatcatccagatcttcatcttgttgggtggaataatgtgaaaattgatatatggactcattctgtgggtggactcacagaaaatgatttcatactagctgc

SEQ ID NO: 389 - protein, 129 aa, Solanum lycopersicum
MCSNLAVSAKTNTHYGIKTLSSAAVLSTKKCVPCNTKDLRPMTEEAAYQLMPQVSGWDLVNDGGTLKLHKSWKVKTFTKGLEFFQEVASVAEAEGHHPDLHLVGWNNVKIDIWTHSVGGLTENDFILAA

SEQ ID NO: 390 - DNA, 761 bp, Solanum lycopersicum
  misc_feature (17)..(17): n is a, c, g, or t
  misc_feature (299)..(299): n is a, c, g, or t
  misc_feature (302)..(302): n is a, c, g, or t
  misc_feature (313)..(313): n is a, c, g, or t
  misc_feature (440)..(440): n is a, c, g, or t
  misc_feature (600)..(600): n is a, c, g, or t
  misc_feature (671)..(671): n is a, c, g, or t
  misc_feature (673)..(673): n is a, c, g, or t
  misc_feature (680)..(680): n is a, c, g, or t
  misc_feature (708)..(708): n is a, c, g, or t
  misc_feature (714)..(716): n is a, c, g, or t
  misc_feature (725)..(726): n is a, c, g, or t
  misc_feature (738)..(738): n is a, c, g, or t
  misc_feature (750)..(752): n is a, c, g, or t
  misc_feature (760)..(760): n is a, c, g, or t
agccttttctttttccnagaagaggagctggtctttttttttaagaaggtgattggaagagttatcaaacaggtggcaggaatcatcgatgattcgaacgcttcaagctcgtctggcaaatctcttggacacttttttttcctcctctccggtgttgtacttatgtattgacattcttttcaatttcttcagatatcgtttacatcactctcccaaaccttgtacagaaacaatggaagttttgtcaactaaaaagtgtgtaccatgcaacacaaaggatttgaggcctatgactgaanaanctgcctatcanttgatgccacaggtgtcggggtgggatttggtgaatgatggtggcacactgaagctgcataagtcctggaaggtcaagactttcaccaaaggattggagttctttcaagaggtggcgagtgttgcanaagctgaaggtcatcatccagatcttcatcttgttgggtggaataatgtgaaaattgatatatggactcattctgtgggtggactcacagaaaatgatttcatactagctgccaaagttaatgggcttgatgtgcaggaccttctcagcaagaaacttancaaaccagcacaaagcagtggttaaccttccaagtttagagttgtattatgatgttagtttcttatatacnanatatcangggcatttgagtactgttgttatttaanaaatgnnnctagagganntcgtcttttcanggggcattttgnnnactatgana

SEQ ID NO: 391 - protein, 178 aa, Solanum lycopersicum
  misc_feature (71)..(72): Xaa can be any naturally occurring amino acid
  misc_feature (75)..(75): Xaa can be any naturally occurring amino acid
  misc_feature (118)..(118): Xaa can be any naturally occurring amino acid
  misc_feature (171)..(171): Xaa can be any naturally occurring amino acid
MIRTLQARLANLLDTFFSSSPVLYLCIDILFNFFRYRLHHSPKPCTETMEVLSTKKCVPCNTKDLRPMTEXXAYXLMPQVSGWDLVNDGGTLKLHKSWKVKTFTKGLEFFQEVASVAXAEGHHPDLHLVGWNNVKIDIWTHSVGGLTENDFILAAKVNGLDVQDLLSKKLXKPAQSSG

SEQ ID NO: 392 - DNA, 986 bp, Solanum lycopersicum
ttctagataaaatcaccacacatatcctctctaataagagcagagcagagcagagcagtgaactcctcttctctttctcagatggctgctgcaactcatctttctttttctccaccaatttcagtttcttctctccctttacgcaaacctaactttgttactcccaatctccagaccagtcaatctcgaatttgcacaagaatacgttgcaatactaacttattaggtgattttggggccagagacccatttccagctgaagtggagagtaaatttggtgaaaaggttttgggtaatcctgacacggagcacaaaattctcatcccagctgcctctgctttgtcccttgctaatcaggaatgcactgatatctcacccaatcagactcccttgtccgaatttgaagctaaacagcttttattcaaggttgttggctggagaatagcaaatgaagatggggtgcttaaactacaatgcacatggaaattaaaagactttgattgtggggttgaactaatcaatagaataggcaaggtggtggaaggcacagggcacctccccactcttcatcaattacaacagtctaatcaagttcatgctgagctgtggactccttcgattggaggtttgagcatgaatgatttcatcatagctgctaaaatagatcaagtaaagacatcggacctcgtaccaagaaaaagagtctgggcatgatcagataatagcattacgaatcacaccaaatacagtttccagaattgcagtcgcttatcgtcagtgataaaaaccttgtctgataagcaatggcaagggaatttttactgcatgattctgtattagttttatgattgattctaaacaaagccacctttattatcaaatcctctgaactatgggattcaaatcccaaggtataacaatcctcatatcatgtatttaatttttgtttattattttaatgtaaaaggtaattattttttctaaaa

SEQ ID NO: 393 - protein, 210 aa, Solanum lycopersicum
MAAATHLSFSPPISVSSLPLRKPNFVTPNLQTSQSRICTRIRCNTNLLGDFGARDPFPAEVESKFGEKVLGNPDTEHKILIPAASALSLANQECTDISPNQTPLSEFEAKQLLFKVVGWRIANEDGVLKLQCTWKLKDFDCGVELINRIGKVVEGTGHLPTLHQLQQSNQVHAELWTPSIGGLSMNDFIIAAKIDQVKTSDLVPRKRVWA

SEQ ID NO: 394 - DNA, 668 bp, Saccharum officinarum
  misc_feature (425)..(425): n is a, c, g, or t
  misc_feature (520)..(520): n is a, c, g, or t
caaagcggactccgttttccctctccggatccggctccggcgaagcagcgggagccaccgatgctccgggccgcaacggtgcacgtgcgtctcctcctatcgcgctcctacgtatggcaggcgaaggtagcttgtcgctggcctctcgtccgcaggaagccttcgcatcttggatctgtacgccctttctatcagatggacactagagggcaagacgaaaataaaattttgactgcaagagggtgccatagctcccctgagagtcaagaattagcaatgaaaagctgtgttccatgcaactctaaggatttacatcccatgtcagaagattctgctaaaaagttgcttgaacaggtgaatggttgggaactgatcactgaaggtggtattctgaaattacatagagcatggaaggtgaagaactntgttaaaggacttgagttctttcaacttgttgctgctatcgctgaggaacaaggtcaccatccagatcttcatcttgttggttggaataacgtgnaaattgatgtttggactcattctgtcagaaggtttaacaagtaatgaatttcatcccttgctggcgaaagaatccaaatgggaaatttcttctttttttttttacaaacaaacaactttttttttttttttttttttttaaaaaaaaa

SEQ ID NO: 395 - protein, 167 aa, Saccharum officinarum
  misc_feature (122)..(122): Xaa can be any naturally occurring amino acid
  misc_feature (154)..(154): Xaa can be any naturally occurring amino acid
MLRAATVHVRLLLSRSYVWQAKVACRWPLVRRKPSHLGSVRPFYQMDTRGQDENKILTARGCHSSPESQELAMKSCVPCNSKDLHPMSEDSAKKLLEQVNGWELITEGGILKLHRAWKVKNXVKGLEFFQLVAAIAEEQGHHPDLHLVGWNNVXIDVWTHSVRRFNK

SEQ ID NO: 396 - DNA, 652 bp, Saccharum officinarum
ccgcaggaagccttcgcatcttggatctgtacgccctttctatcagatggacactagagggcaagacgaaaataaaattttgactgcaagagggtgccatagctcccctgagagtcaagaattagcaatgaaaagctgtgttccatgcaactctaaggatttacatcccatgtcagaagattctgctaaaaagttgcttgtacaggtgaatggttgggaactgatcactgaaggtggtattctgaaattacatagagcatggaaggtgaagaactttgttaaaggactcgagttctttcaacttgttgctgctatcgctgaagaacaaggtcaccatccagatcttcatcttgttggttggaataacgtgaaaattgatgtttggactcattctgtcagaagtttaacaagtaatgatttcatccttgctgcgaagatcaatgatctcactttagaaggcattataaggaagaaagctacatagctaatgtctcagaagtaactcagatctgtcgacccaagcagtccttgtttatgtactacactcaaaatatgtaactcgtatttgcttgggaaaatgtatacagcggtggagaggtcaaattaaaaggcaccttaacggaatatgagtttaacttggtgaaaatagacc

SEQ ID NO: 397 - protein, 145 aa, Saccharum officinarum
MDTRGQDENKILTARGCHSSPESQELAMKSCVPCNSKDLHPMSEDSAKKLLVQVNGWELITEGGILKLHRAWKVKNFVKGLEFFQLVAAIAEEQGHHPDLHLVGWNNVKIDVWTHSVRSLTSNDFILAAKINDLTLEGIIRKKAT

SEQ ID NO: 398 - DNA, 676 bp, Saccharum officinarum
  misc_feature (79)..(79): n is a, c, g, or t
  misc_feature (105)..(105): n is a, c, g, or t
tgtacgccctttctataagatgcacactagagggcaagacgaaaataaaattttgactgcaagagggtgccatagctcncctgagagtcaagaattagcaatganaagctgtgttccatgcaactctaaggatttacatcccatgtcagaagattctgctaaaaagttgcttgtacaggtgaatggttgggaactgatcactgaaggtgtaattctgaaattacatagagcatggaaggtgaagaactttgttaaaggactcgagttctttcaacttgttgctgctatcgctgaggaacaaggtcaccatccagatcttcatcttgttggttggaataacgtgaaaattgatgtttggactcattctgtcagaggtttaacaagtaatgatttcatccttgctgcgaagatcaatgatctcactttagaaggcattataaggaagaaagctacatagctaatgtctcagaagtaactcagatctgtcgacccaagcagtcctgttttatgtactccactcaaaatatgtaactcgtatttgcttgggaaaatgtatacagcgttggagaagtcaaatttagaggtcacctcaccggagtatgagttttaacttgctgaaaaatagtacttaaatagctcattgtactttgctaattagtaatttccttgagatgga

SEQ ID NO: 399 - protein, 145 aa, Saccharum officinarum
  misc_feature (29)..(29): Xaa can be any naturally occurring amino acid
MHTRGQDENKILTARGCHSSPESQELAMXSCVPCNSKDLHPMSEDSAKKLLVQVNGWELITEGVILKLHRAWKVKNFVKGLEFFQLVAAIAEEQGHHPDLHLVGWNNVKIDVWTHSVRGLTSNDFILAAKINDLTLEGIIRKKAT

SEQ ID NO: 400 - DNA, 613 bp, Triticum aestivum
  misc_feature (2)..(4): n is a, c, g, or t
  misc_feature (484)..(485): n is a, c, g, or t
  misc_feature (583)..(590): n is a, c, g, or t
cnnncgtccggcccaccaccgccatgcggaacctcctcttcggcaccaccaccagcaccaccagcggtcaccggagcactcgcaaggtggtggcgatggcggacatcctgggcgacttcggcgcgcgggacccgttcccggaggagatcgcgagcaacttcggggagaagacgctgggcaacgtggacacgctgcaccgcatcctcatccccacgctctccgtgctctccctctcccgcgtcccgctcgacgccgacccggccccgctctccgaggaggacgcccgcaagctgctcttcaaggtggtcggctggcggctcctcttccccagcaagggcgactccgacgtgctcaagctcgagtgcgtctggaaagtccgcgaccaggcctgcggcgacgagctcgtcgccaggatcaacaaggcgctcgacggcgccggccacgcccccgccgcgctccggttcgaggcgcccaaccaagtcanngcccagctctacacgccgtccgtaagcgggctgagcgccaacgacttcatcatcgcggcgaggatcgaccagatcaagaccaaagatctcctcccaannnnnnnngtctgggcatgctaatggccgca

SEQ ID NO: 401 - protein, 193 aa, Triticum aestivum
  misc_feature (154)..(154): Xaa can be any naturally occurring amino acid
  misc_feature (187)..(189): Xaa can be any naturally occurring amino acid
MRNLLFGTTTSTTSGHRSTRKVVAMADILGDFGARDPFPEEIASNFGEKTLGNVDTLHRILIPTLSVLSLSRVPLDADPAPLSEEDARKLLFKVVGWRLLFPSKGDSDVLKLECVWKVRDQACGDELVARINKALDGAGHAPAALRFEAPNQVXAQLYTPSVSGLSANDFIIAARIDQIKTKDLLPXXXVWAC

SEQ ID NO: 402 - DNA, 572 bp, Triticum aestivum
  misc_feature (376)..(376): n is a, c, g, or t
  misc_feature (483)..(483): n is a, c, g, or t
  misc_feature (517)..(517): n is a, c, g, or t
  misc_feature (566)..(566): n is a, c, g, or t
cattgcttcccccagccgcgcatcatccatccatccatccgttcctctctccttccttcctgtccactacaccatggcgctcatgctcagcccggccgcgaccttcctccccgtcgccggcaagcccgccgccgccatgcggaacctcctcttcggcaccagcagcaagggaagaagcgttcgcaaggtggtggcgatggcggacatcctgggcgacttcggggcgcgggacccgttcccggaggagatcgcgagcaacttcggggagaagacgctgggcaacgtggacacgctgcaccgcatcctcattcccacgctctccgtgctctcgctctcccgcgtgccgctcgacgccgaccccgcgccgctctccgangaggacgcccgcaagctgctcttcaaggtggtcggatggcggctcctcttccccaacaagggcgactccgaacgtgctcaagctcgagtgcgtctggaaagtccgcnacaaggctgcggcgaacaactcatcgccaggatnaacaagacctcgacggcgccggcatgccccgccgcgctcaattcgaggngcccaa

SEQ ID NO: 403 - protein, 167 aa, Triticum aestivum
  misc_feature (101)..(101): Xaa can be any naturally occurring amino acid
  misc_feature (137)..(137): Xaa can be any naturally occurring amino acid
  misc_feature (148)..(148): Xaa can be any naturally occurring amino acid
  misc_feature (165)..(165): Xaa can be any naturally occurring amino acid
  misc_feature (167)..(167): Xaa can be any naturally occurring amino acid
MALMLSPAATFLPVAGKPAAAMRNLLFGTSSKGRSVRKVVAMADILGDFGARDPFPEEIASNFGEKTLGNVDTLHRILIPTLSVLSLSRVPLDADPAPLSXEDARKLLFKVVGWRLLFPNKGDSERAQARVRLESPXQGCGEQLIARXNKTSTAPACPAALNSRXPX

SEQ ID NO: 404 - DNA, 573 bp, Triticum aestivum
  misc_feature (392)..(392): n is a, c, g, or t
  misc_feature (452)..(452): n is a, c, g, or t
  misc_feature (462)..(462): n is a, c, g, or t
  misc_feature (465)..(465): n is a, c, g, or t
  misc_feature (489)..(489): n is a, c, g, or t
  misc_feature (497)..(497): n is a, c, g, or t
  misc_feature (517)..(517): n is a, c, g, or t
  misc_feature (524)..(524): n is a, c, g, or t
  misc_feature (547)..(547): n is a, c, g, or t
  misc_feature (557)..(557): n is a, c, g, or t
atccatccatccgttccactgcaccatggcgctcatgctcagcccggccgcgaccttcctccccgtcgtcgccggcaagcccaccaccgccatgcggaacctcctcttcggcaccaccaccagcaccaccagcggtcaccggagcactcgcaaggtggtggcgatggcggacatcctgggcgacttccggcgcgcgggacccgttcccggaggagattcgccgagcaactttcggggagaaagacgctgggcaacgttggacacgctgcaccgcatcctcatccccacgtctccgtgtctccctctcccgcgtcccgctccgacgccgaccggcccgctctccgaggaggacgcccgcagctgctcttcaaggtggtccgttggggtcctcnttcccaagcaagggcactccgactgtcaactccatgcgtctggaagtccgcacaaagctnccgggaacanttntccccaagatttaacaagggcccnacgggccngcaagccccgccggctccgntttaggngccaacaattaaggccaatctanagccgtcgtnagcggctgacgcaaca

SEQ ID NO: 405 - protein, 183 aa, Triticum aestivum
  misc_feature (123)..(123): Xaa can be any naturally occurring amino acid
  misc_feature (143)..(143): Xaa can be any naturally occurring amino acid
  misc_feature (146)..(147): Xaa can be any naturally occurring amino acid
  misc_feature (155)..(155): Xaa can be any naturally occurring amino acid
  misc_feature (158)..(158): Xaa can be any naturally occurring amino acid
  misc_feature (167)..(167): Xaa can be any naturally occurring amino acid
  misc_feature (174)..(174): Xaa can be any naturally occurring amino acid
  misc_feature (178)..(178): Xaa can be any naturally occurring amino acid
  misc_feature (183)..(183): Xaa can be any naturally occurring amino acid
MALMLSPAATFLPVVAGKPTTAMRNLLFGTTTSTTSGHRSTRKVVAMADILGDFRRAGPVPGGDSPSNFRGERRWATLDTLHRILIPTSPCLPLPRPAPTPTGPLSEEDARSCSSRWSVGVLXPKQGHSDCQLHASGSPHKAXGNXXPQDLTRAXRAXKPRRLRFRXQQLRPIXSRRXRLTQX

SEQ ID NO: 406 - DNA, 597 bp, Triticum aestivum
  misc_feature (342)..(342): n is a, c, g, or t
  misc_feature (361)..(361): n is a, c, g, or t
  misc_feature (389)..(389): n is a, c, g, or t
  misc_feature (426)..(426): n is a, c, g, or t
  misc_feature (431)..(431): n is a, c, g, or t
  misc_feature (457)..(457): n is a, c, g, or t
  misc_feature (464)..(464): n is a, c, g, or t
  misc_feature (469)..(469): n is a, c, g, or t
  misc_feature (521)..(521): n is a, c, g, or t
  misc_feature (523)..(523): n is a, c, g, or t
  misc_feature (539)..(539): n is a, c, g, or t
  misc_feature (552)..(552): n is a, c, g, or t
  misc_feature (559)..(559): n is a, c, g, or t
  misc_feature (576)..(576): n is a, c, g, or t
  misc_feature (581)..(581): n is a, c, g, or t
  misc_feature (583)..(583): n is a, c, g, or t
  misc_feature (594)..(594): n is a, c, g, or t
ccatggcgctcatgctcagcccggccgcgaccttcctccccgtcgccaccggcaagcccaccgccaccgccggcgccatgcgaagcctcctcttcaccaccaccagcggcaccgccagcggccaccggagcagcaggaaggtggtggcgatggcggacatcctgggggacttcggcgcgcgggacccgttcccggaggagatcgcgagcaacttcggggagaagacgctgggcaacgtggacacgctgcaccgcatcctcatccccacgctctccgtgctctccctctcccgcgtcccgctcgaagcccacccggcgccgctctccgaggaggaccccgcangctgctcttcaagtcgtcngatggcgcctcctcttcccgggaaaggngatccgaactgctcaaactccaatgcgtctggaaagnccgcnacaaggcctgcgggaacaagtaatcncaagatnggaangggctcaacgggccggcaagccccgccgggctctcttcaaccgccaacaatnangggaaagttgaaaccnccgtagtggctangcaaganttatatccgggaggttnaccantnagcaaagtccncca

SEQ ID NO: 407 - protein, 180 aa, Triticum aestivum
  misc_feature (114)..(114): Xaa can be any naturally occurring amino acid
  misc_feature (120)..(120): Xaa can be any naturally occurring amino acid
  misc_feature (142)..(142): Xaa can be any naturally occurring amino acid
  misc_feature (152)..(152): Xaa can be any naturally occurring amino acid
  misc_feature (154)..(154): Xaa can be any naturally occurring amino acid
  misc_feature (156)..(156): Xaa can be any naturally occurring amino acid
  misc_feature (173)..(174): Xaa can be any naturally occurring amino acid
MALMLSPAATFLPVATGKPTATAGAMRSLLFTTTSGTASGHRSSRKVVAMADILGDFGARDPFPEEIASNFGEKTLGNVDTLHRILIPTLSVLSLSRVPLEAHPAPLSEEDPAXCSSSRXMAPPLPGKGDPNCSNSNASGKXATRPAGTSNXKXGXGSTGRQAPPGSLQPPTXXGKLKPP

SEQ ID NO: 408 - DNA, 493 bp, Triticum aestivum
  misc_feature (345)..(345): n is a, c, g, or t
  misc_feature (354)..(354): n is a, c, g, or t
  misc_feature (356)..(356): n is a, c, g, or t
  misc_feature (398)..(398): n is a, c, g, or t
  misc_feature (459)..(459): n is a, c, g, or t
  misc_feature (465)..(465): n is a, c, g, or t
  misc_feature (478)..(478): n is a, c, g, or t
  misc_feature (489)..(489): n is a, c, g, or t
acctcctccgtccgtccattgcctcccccagccgcgcatcatccatccatccgtcccagtgcgccatggcgctcatgctcagcccggccgcgaccttcctccccgtcgccaccggcaagcccaccgccaccgccggcgccatgcgaagcctcctcttcaccaccaccagcggcaccgccagcggccaccggagcagcaggaaggtggtggcgatggcggacatcctgggggacttcgggcgcgcgggacccgttccccggagggagatcgcgaagcaacttcgggggagaaagacgctgggcaacgtgggacacggctgcaacgcaatcctcaatccccaaggcntctccgtgntncccctctcccggcgtccccggctccgaaagcccaacccgggngccggcttcttccgaaggagggaacgccccggcaagggctgctccttcaaagggtcggtcngggatngggggcctccctnttccccggggnaggg

SEQ ID NO: 409 - protein, 143 aa, Triticum aestivum
  misc_feature (94)..(94): Xaa can be any naturally occurring amino acid
  misc_feature (97)..(97): Xaa can be any naturally occurring amino acid
  misc_feature (132)..(132): Xaa can be any naturally occurring amino acid
  misc_feature (134)..(134): Xaa can be any naturally occurring amino acid
  misc_feature (138)..(138): Xaa can be any naturally occurring amino acid
  misc_feature (142)..(142): Xaa can be any naturally occurring amino acid
MALMLSPAATFLPVATGKPTATAGAMRSLLFTTTSGTASGHRSSRKVVAMADILGDFGRAGPVPRREIAKQLRGRKTLGNVGHGCNAILNPQGXSVXPLSRRPRLRKPNPGAGFFRRRERPGKGCSFKGSVXDXGPPXSPGXG

SEQ ID NO: 410 - DNA, 622 bp, Triticum aestivum
  misc_feature (502)..(505): n is a, c, g, or t
  misc_feature (581)..(583): n is a, c, g, or t
ccgcggtcgcagccgcagccgcagccgactggacgccgcaagccgcgcgcagcgccggtgaagagccggacctgtcacctcctccgctcccgtcagttccggccacttcactgcgagccccactgaccctcaaaggcctcaacatggcaggtctgctgctgcgtagattcatcgggatccagccccgggcgccgatgaccgccgccggtggagccgcgctcttctacgcctcgtgtccctcgtcgccccgcaccgtcgcgcacctggaggtgaggggggaacaggccgctgctgaagctgaattatcaaagaagagttgtatcccatgcaattcaaaggatctgcacgccatgtcagaagattctgctaaaaagtcccttgaacaggtgactggttgggaactgaaaaatgaaggtgacattttgaaattacacagagcatggaaggtgaagaattttgtaaaaggacttgagttctttcagcttgttgctgctgttgctgnnnnagaaggtcaccacccagatcttcatctcgtcagttggaacaatgtgaaaatcgatgtctggactcattcagtcagnnntttaacagataatgacttcatccttgctgcaaagatcaa

SEQ ID NO: 411 - protein, 160 aa, Triticum aestivum
  misc_feature (120)..(121): Xaa can be any naturally occurring amino acid
  misc_feature (146)..(147): Xaa can be any naturally occurring amino acid
  misc_feature (160)..(160): Xaa can be any naturally occurring amino acid
MAGLLLRRFIGIQPRAPMTAAGGAALFYASCPSSPRTVAHLEVRGEQAAAEAELSKKSCIPCNSKDLHAMSEDSAKKSLEQVTGWELKNEGDILKLHRAWKVKNFVKGLEFFQLVAAVAXXEGHHPDLHLVSWNNVKIDVWTHSVXXLTDNDFILAAKIX

SEQ ID NO: 412 - DNA, 1071 bp, Triticum aestivum
  misc_feature (7)..(7): n is a, c, g, or t
  misc_feature (757)..(757): n is a, c, g, or t
gctaggncgacccacgcgtccgacaaattgtgtggtgataaaaggaagagaaggcttcaagcgacggccagataagaagcaacctcgtccgtccgtccattgcctcccccagccgcgcatcatccatccatccgtcccagtgcgccatggcgctcatgctcagcccggccgcgaccttcctccccgtcgccaccggcaagcccaccgccaccgccggcgccatgcgaagcctcctcttcaccaccaccagcggcaccgccagcggccaccggagcagcaggaaggtggtggcgatggcggacatcctgggggacttcggcgcgcgggacccgttcccggaggagatcgcgagcaacttcggggagaagacgctgggcaacgtggacacgctgcaccgcatcctcatccccacgctctccgtgctctccctctcccgcgtcccgctcgaagcccacccggcgccgctctccgaggaggacgcccgcaggctgctcttcaaggtcgtcggatggcgcctcctcttccccggcaagggcgactccgacgtgctcaagctcgagtgcgtctggaaggtccgcgaccaggcctgcggcgacgagctcatcgccaggatcggcaaggcgctcgacggcgccggccatgcccccgccgcgctcctcttcgagccgcccaacaagtcagggcacagctctgcacgccctccgtaggtgggctgagcgcccacgacttcatcatcgcggcgaggatcgaccagatncagaccaaagatctcctccccaagaagagggtctgggcatgctaatccatggcgtcttgtccctatttctttgcattgcacacatacacagttttgtttcatgggaagtttgtagctctactgctaatgtttgatgatgatgatggcgatcgccattttgtccaatcaaatcaaatgatttctcaaaaaaaaaaaaaagggcggccgccctaaaagtatccctcgaggggccccagctttagcgtaccccgctttcttggtacaaggggggccccattggggggcgtatttttaagcaagggccgggccgccgt

SEQ ID NO: 413 - protein, 186 aa, Triticum aestivum
MALMLSPAATFLPVATGKPTATAGAMRSLLFTTTSGTASGHRSSRKVVAMADILGDFGARDPFPEEIASNFGEKTLGNVDTLHRILIPTLSVLSLSRVPLEAHPAPLSEEDARRLLFKVVGWRLLFPGKGDSDVLKLECVWKVRDQACGDELIARIGKALDGAGHAPAALLFEPPNKSGHSSARPP

SEQ ID NO: 414 - DNA, 1007 bp, Triticum aestivum
gatcgacattgtcatcatcaagggtgagcagtagagctacaaactttccatgaaacaaaactgtgtatgtgtgcaatgcaaagaaataggaacaagacgccatggattagcatgcccagaccctcttctttgggaggagatctttggtcttgatctggtcgatcctcgccgcgatgatgaagtcgttggcgctcagcccacctacggagggcgtgcagagctgtggccgggcttggttgggcggctcgaagaggagcgcggcgggggcatggccggcgccgtcgagcgccttgccgatcctggcgatgagctcgtcgccgcaggcctggtcgcggaccttccagacgcactcgagcttgagcacgtcggagtcgcccttgccggggaagaggaggcgccatccgacgaccttgaagagcagcctgcgggcgtcctcctcggagagcggcgccgggtgggcttcgagcgggacgcgggagagggagagcacggagagcgtggggatgaggatgcggtgcagcgtgtccacgttgcccagcgtcttctccccgaagttgctcgcgatctcctccgggaacgggtcccgcgcgccgaagtcccccaggatgtccgtcatcgccaccaccttcctgctgctccggtggccgctggcggtgccgctggtggtggtgaagaggaggcttcgcatggcgccggcggtggcggtgggcttgccggtggcgacggggaggaaggtcgcggccgggctgagcatgagcgccatggcgcactgggacggatggatggatgatgcgcggctgggggaggcaatggacggacggaggaggttgcttcttatctttcctactcttcagtccatgtcagtgtcctcgtgccccaatcgcgaaaccttgggtcgaagattttccggggattccggaccggttccagccgtgcttttttgttcaaacttgttctatagtgttacctaaaaaggcctagggctatatactgtttccggggggaaa

SEQ ID NO: 415 - protein, 218 aa, Triticum aestivum
MALMLSPAATFLPVATGKPTATAGAMRSLLFTTTSGTASGHRSSRKVVAMTDILGDFGARDPFPEEIASNFGEKTLGNVDTLHRILIPTLSVLSLSRVPLEAHPAPLSEEDARRLLFKVVGWRLLFPGKGDSDVLKLECVWKVRDQACGDELIARIGKALDGAGHAPAALLFEPPNQARPQLCTPSVGGLSANDFIIAARIDQIKTKDLLPKKRVWAC

SEQ ID NO: 416 - DNA, 1069 bp, Triticum aestivum
cagaaccgaagaagttgccaaatcatttgttttgattggcaaaatggcgatggcatcatcatcatcgtcattaaacactaggggtagagctacaatggtggataggttggcttccattccatgaaacaaaactgtgtccaggtatgcaatgcaaagaaagaggaacaagatggcatgggcggtcgccattagcatgcccagaccctcttctttgggaggagatctttggtcttgatctggtcgatcctggcggtgatgatgaagtcgttggcgctcagcccagctacggagggcgtgtagagctgggccctgacttggttgggcgcctcgaactggagcgcggcgggggcatggccggcgccgtcgagggtcttgttgatcctggcgatgagctcgtcgccgcaggcctggtcgcggaccttccagacgcactcgagcttgagcacgtcggagtcgcccttgctggggaagaggagccgccatccgaccaccttgaagagcagcttgcgggcatcctcctcggagagcggcgcggggtcggcgtcgagcggcacgcgggatagcgagagcacggagagcgtgggaatgaggatgcggtgcaccgtgtccacgttgcccagcgtcttctccccgaagttgctcgcgatctcctccgggaacgggtcccgggccccgtagtcccccaggatgtccggcatcgccaccaccttgcgaacgcttcttcccttgctgctggtgccgaaaaagaagttccgcatgggcggccgcgggcttgccggcgaccgggaggaaggtcccggccggcctgaccattaacgccatggttttgtggacaagaaggaaggaaaattgaacgaatggattgatgattaacgcccggttgggggaagcaaatgcccggaggacttgcttcgtaatcttcccaccccttcggccaaggaaaggtcctcgtgctccaatctctggcaccctgtgggtcagaaatattcacgggaaattcgggacccggggccaacgcgggctttgttggaccaaaaaggtgtctataactttcacacaaaactgggcc

SEQ ID NO: 417 - protein, 207 aa, Triticum aestivum
WSGRPGPSSRSPASPRPPMRNFFFGTSSKGRSVRKVVAMPDILGDYGARDPFPEEIASNFGEKTLGNVDTVHRILIPTLSVLSLSRVPLDADPAPLSEEDARKLLFKVVGWRLLFPSKGDSDVLKLECVWKVRDQACGDELIARINKTLDGAGHAPAALQFEAPNQVRAQLYTPSVAGLSANDFIITARIDQIKTKDLLPKKRVWAC

SEQ ID NO: 418 - DNA, 1033 bp, Triticum aestivum
gcccgcggggcggagtaccatttttcacaccgggaacaggttattgccccttaggcctatttagggtgacaataatagaacaagtttggacaaataagcacggctggtaccggttccggatttcccgggatatcgttgacccacgcgtccgcgacttgggcacgaggacccctggacatggactgaaggggtagaaaagccgcgcatcatccatccatcccgttccactgcaccatggcgctcatgatcagcccgcccgcgactttcctccccgtggtcgccggcaagcccaccaccgccatgcggaacctccttttcggcaccaccaccagcaccaccagcggtcaccggagcactcgcaaggtggtggcgatggcggacatcctgggcgacttcggcgcgcgggacccgttcccggaggagatcgcgagcaacttcggggagaagacgctgggctacgtggacacgctgcaccgcatcctcatccccacgctctccgtgctctccctctcccgcgtcccgctcgacgctgacccggccccgctctccgaggaggacgcccgcaggctgctcttcaaggtggtcggctggcggctcctcttccccagcaagggcgactccgacgtgctcaagctcgagtgcgtctggaaggtccgcgaccaggcctgcggcgacgagctcgtcgccaggatcaacaaggcgctcgacggcgccggccacgcccccgccgcgctccggttcgaggcgcccaaccaagtcagggcccagctctacaagccgtccgtaggcgggctgagcgccaacgacttcatcatcgcggcgaggatcgaccagatcaagaccaaagatctcctcccaaagaagagggtctgggcatgctaatggccgcagattcccctcttcttgctcctctttgcatacacatacacagttttgtttcatggaaagccaatggatccatgtttgtagctctactgctagtgtctgatgatgatgatggcgtagccattttgtgcaatcaaatgatttctcg

SEQ ID NO: 419 - protein, 215 aa, Triticum aestivum
MALMISPPATFLPVVAGKPTTAMRNLLFGTTTSTTSGHRSTRKVVAMADILGDFGARDPFPEEIASNFGEKTLGYVDTLHRILIPTLSVLSLSRVPLDADPAPLSEEDARRLLFKVVGWRLLFPSKGDSDVLKLECVWKVRDQACGDELVARINKALDGAGHAPAALRFEAPNQVRAQLYKPSVGGLSANDFIIAARIDQIKTKDLLPKKRVWAC

SEQ ID NO: 420 - DNA, 746 bp, Triticum aestivum
gagggcagccgactggacgccgcaagcagcgcagcgccggtctgctgctgcgtacattcatccggatccagccccgggcgccgatgagcgccgccggtggagccgcgcccttctacgcctcgtgtccctcgtcgccccgcaccgtcgcgcacctggaggtgaggggggagcaggccgctgctgaagttgaattatcaaagaagagttgtatcccatgcatttcaaaggatctgcatgccatgtcagaagattctgctaaaaagtcacttgaacaggtgactggttgggaactgaaaaatgaaggtgacattttgaaattacacagagcatggaaggtgaagaattttgtaaaaggtcttgagttctttcagcttgttgctgctgttgctgaggaagaaggtcaccacccagatcttcatctcgtcagttggaacaatgtgaaaatcgatgtctggactcattcagtcagaggtttaacagataatgacttcatccttgctgcaaagatcaatgaactcaagctagaaggccttttgagcaagaaaaaggctacttcccaggagtagctttgggagatcaagcagataacttttaatgtgtagatgccaagaaatgcccttttatattgtctgcgatgattgtacatgccgttccaaaatgagtacttccgatgtgaattccacttaacctttggtgagatctatctgttctgggcgatgcgtttctctgatgatacgaatctgggt

SEQ ID NO: 421 - protein, 160 aa, Triticum aestivum
MSAAGGAAPFYASCPSSPRTVAHLEVRGEQAAAEVELSKKSCIPCISKDLHAMSEDSAKKSLEQVTGWELKNEGDILKLHRAWKVKNFVKGLEFFQLVAAVAEEEGHHPDLHLVSWNNVKIDVWTHSVRGLTDNDFILAAKINELKLEGLLSKKKATSQE

SEQ ID NO: 422 - DNA, 738 bp, Triticum aestivum
ccacgcgtccgcccactcccacggcactgcgccgccgtctccccgaagctcagggatggaggggcgtaccctactcctcgaccaggcggcacccagcgcgtccgcccctactggccgctccgcctcgcaggcgacgggggacgaggccgcggctaaagtcgaattatcaaaaaggagctgtgtctcatgcaattcaaaggatttacaagccatgtcagaagattctgctaaaacgttgctagagcaggtggctggctgggaggtgaaaaatgagggcgacattctgaaattgcacagggcatggaaggtgaaaaactttgccaaagggcttgagttctttcagcttgttgctgctgttgcggaggaagaaggtcaccacccagatcttcatcttgttggttggaataatgtgaaaattgatgtgtggactcactcagtcagtggtttaacagataatgatttcatccttgctgcaaagatcaatgaactcaagctaggaggccttttgagcaagaaaaaagctactgcccagaagtagctcttgttaatcaaagatatccttttgtatttggggaaaattgcatatgccgctccaaaagcaggattcgtccagtatatattctgggataaatgatggtttggcaatgctattgggtcctcctgagaaagtccagggaggatccccgaaattaatttaatgggtaatgaggtctgccacaaaacctttctggattttgg

SEQ ID NO: 423 - protein, 160 aa, Triticum aestivum
MEGRTLLLDQAAPSASAPTGRSASQATGDEAAAKVELSKRSCVSCNSKDLQAMSEDSAKTLLEQVAGWEVKNEGDILKLHRAWKVKNFAKGLEFFQLVAAVAEEEGHHPDLHLVGWNNVKIDVWTHSVSGLTDNDFILAAKINELKLGGLLSKKKATAQK

SEQ ID NO: 424 - DNA, 726 bp, Triticum aestivum
  misc_feature (514)..(514): n is a, c, g, or t
  misc_feature (692)..(692): n is a, c, g, or t
ccacgcgtccgcatccatccatccgttccactgcaccatggcgctcatgctcagcccggccgcgaccttcctccccgtcgtcgccggcaagcccaccaccgccatgcggaacctcctcttcggcaccaccaccagcaccaccagcggtcaccggagcactcgcaaggtggtggcgatggcggacatcctgggcgacttcggcgcgcgggacccgttcccggaggagatcgcgagcaacttcggggagaagacgctgggcaacgtggacacgctgcaccgcatcctcatccccacgctctccgtgctctccctctcccgcgtcccgctcgacgccgacccggccccgctctccgaggaggacgcccgcaggctgctcttcaaggtggtcggctggcggctcctcttccccagcaagggcgactccgacgtgctcaagctcgagtgcgtctggaaggtccgcgaccaggcctgcggcgacgagctcgtcgccaggatcaacaaggcgctcgacggngccggccacgcccccggcgcgcttcggttcgaggcgcccaaccaagtcagggcccagctctacacgcccgtcgtaggcgggctgagcgccaacgacttcatcatcgcggcgaggatcgaccagatcaagacaaagatctcctccaaaaaagaaggtctgggcatgctaatggccgcanaatcccctccttcttgctcctccttgcatacaca

SEQ ID NO: 425 - protein, 230 aa, Triticum aestivum
  misc_feature (219)..(219): Xaa can be any naturally occurring amino acid
  misc_feature (230)..(230): Xaa can be any naturally occurring amino acid
MALMLSPAATFLPVVAGKPTTAMRNLLFGTTTSTTSGHRSTRKVVAMADILGDFGARDPFPEEIASNFGEKTLGNVDTLHRILIPTLSVLSLSRVPLDADPAPLSEEDARRLLFKVVGWRLLFPSKGDSDVLKLECVWKVRDQACGDELVARINKALDGAGHAPGALRFEAPNQVRAQLYTPVVGGLSANDFIIAARIDQIKTKISSKKEGLGMLMAAXSPPSCSSLHTX

SEQ ID NO: 426 - DNA, 788 bp, Triticum aestivum
ccacgcgtccgcatccatccgttccactgcaccatggcgctcatgctcagcccggccgcgaccttcctccccgtcgtcgccggcaagcccaccaccgccatgcggaacctcctcttcggcaccaccaccagcaccaccagcggtcaccggagcactcgcaaggtggtggcgatggcggacatcctgggcgacttcggcgcgcgggacccgttcccggaggagatcgcgagcaacttcggggagaagacgctgggcaacgtggacacgctgcaccgcatcctcatccccacgctctccgtgctctccctctcccgcgtcccgctcgacgccgacccggccccgctctccgaggaggacgcccgcaggctgctcttcaaggtggtcggctggcggctcctctttcccagcaagggcgactccgacgtgctcaagctcgagtgcgtctggaaggtccgcgaccaggcctgcggcgacgagctcgtcgccaggatcaacaaggggcttcgaggcgccgggccaagcccccgacgcgtttcgggttcaaggcgccaaacaagtcaggggcccactctacaccccgtccgtaagggggatgaaacccaaaaaacttcctcatccggggggaggatcgaacccaaatcaggaactaagtatccccctcccaaaaaaagaagggtctgggcaaatgctaatgggccgacaaattccccctctttctttggctcctccttttggaataaacaccacccagatttttggttttcctgggaaaagcccatagggtatcc

SEQ ID NO: 427 - protein, 252 aa, Triticum aestivum
MALMLSPAATFLPVVAGKPTTAMRNLLFGTTTSTTSGHRSTRKVVAMADILGDFGARDPFPEEIASNFGEKTLGNVDTLHRILIPTLSVLSLSRVPLDADPAPLSEEDARRLLFKVVGWRLLFPSKGDSDVLKLECVWKVRDQACGDELVARINKGLRGAGPSPRRVSGSRRQTSQGPTLHPVRKGDETQKTSSSGGRIEPKSGTKYPPPKKRRVWANANGPTNSPSFFGSSFWNKHHPDFWFSWEKPIGYP

SEQ ID NO: 428 - DNA, 800 bp, Triticum aestivum
ggacaaaatggcgacgccatcatcatcatcaaacactagcagtagagctacaaacatggatccattggctttccatgaaacaaaactgtgtgtgtgtatgcaaagaggagcaagaagaggggaatctgcggccattagcatgcccagaccctcttctttgggaggagatctttggtcttgatctggtcgatcctcgccgcgatgatgaagtcgttggcgctcagcccgcctacggacggcgtgtagagctgggccctgacttggttgggcgcctcgaaccggagcgcggcgggggcgtggccggcgccgtcgagcgccttgttgatcctggcgacgagctcgtcgccgcaggcctggtcgcggaccttccagacgcactcgagcttgagcacgtcggagtcgcccttgctggggaagaggagccgccagccgaccaccttgaagagcagcctgcgggcgtcctcctcggagagcggggccgggtcggcgtcgagcgggacgcgggagagggagagcacggagagcgtggggatgaggatgcggtgcagcgtgtccacgttgcccagcgtcttctccccgaagttgctcgcgatctcctccgggaacgggtcccgcgcgccgaagtcgcccaggatgtccgccatcgccaccaccttgcgagtgctccggtgaccgctggtggtgctggtggtggtgccgaagaggaggttccgcatggcggtggtgggcttgccggcgacgacggggaggaaggtcgcggccgggctgagcatgagcgccatggtgcagcggacgcgtgg

SEQ ID NO: 429 - protein, 215 aa, Triticum aestivum
MALMLSPAATFLPVVAGKPTTAMRNLLFGTTTSTTSGHRSTRKVVAMADILGDFGARDPFPEEIASNFGEKTLGNVDTLHRILIPTLSVLSLSRVPLDADPAPLSEEDARRLLFKVVGWRLLFPSKGDSDVLKLECVWKVRDQACGDELVARINKALDGAGHAPAALRFEAPNQVRAQLYTPSVGGLSANDFIIAARIDQIKTKDLLPKKRVWAC

SEQ ID NO: 430 - DNA, 656 bp, Triticum aestivum
ctcctccgtccattgcttcccccagccgcgcatcatccatccatccatccgttcctctctccttccttcctgtccactacaccatggcgctcatgctcagcccggccgcgaccttcctccccgtcgccggcaagcccgccgccgccatgcggaacctcctcttcggcaccagcagcaagggaagaagcgttcgcaaggtggtggcgatggcggacatcctgggcgacttcggggcgcgggacccgttcccggaggagatcgcgagcaacttcggggagaagacgctgggcaacgtggacacgctgcaccgcatcctcattcccacgctctccgtgctctcgctctcccgcgtgccgctcgacgccgaccccgcgccgctctccgaggaggacgcccgcaagctgctcttcaaggtggtcggatggcggctcctcttccccagcaagggcgactccgacgtgctcaagctcgagtgcgtctggaaggtccgcgaccaggcctgcggcgacgagctcatcgccaggatcaacaagaccctcgacggcgccggccatgcccccgccgcgctccagttcgaggcgcccaaccaagtcagggcccagctctacacgccctccgtaggtgggctgagcgccaacgacttcatcatcgccgcg

SEQ ID NO: 431 - protein, 191 aa, Triticum aestivum
MALMLSPAATFLPVAGKPAAAMRNLLFGTSSKGRSVRKVVAMADILGDFGARDPFPEEIASNFGEKTLGNVDTLHRILIPTLSVLSLSRVPLDADPAPLSEEDARKLLFKVVGWRLLFPSKGDSDVLKLECVWKVRDQACGDELIARINKTLDGAGHAPAALQFEAPNQVRAQLYTPSVGGLSANDFIIAA

SEQ ID NO: 432 - DNA, 757 bp, Triticum aestivum
tccgtcccagtgcgccatggcgctcatgctcagcccggccgcgaccttcctccccgtcgccaccggcaagcccaccgccaccgccggcgccatgcgaaacctcctcttcaccaccaccagcggcaccgccagcggccaccggagcagcaggaaggtggtggcgatggcggacatcctgggggacttcggcgcgcgggacccgttcccggaggagatcgcgagcaacttcggggagaagacgctgggcaacgtggacacgctgcaccgcatcctcatccccacgctctccgtgctctccctctcccgcgtcccgctcgaagcccacccggcgccgctctccgaggaggacgcccgcaggctgctcttcaaggtcgtcggatggcgcctcctcttccccggcaagggcgactccgacgtgctcaagctcgagtgcgtctggaaggtccgcgaccaggcctgcggcgacgagctcatcgccaggatcggcaaggcgctcgacggcgccggccatgcccccgccgcgctcctcttcgagccgcccaaccaagtcagggcacagctctgcacgccctccgtaggtgggctgagcgccaacgacttcatcatcgcggcgaggatcgaccagatcaagaccaaagatctcctcccaaagaagagggtctgggcatgctaatccatggcgtcttgttcctatttctttgcattgcacacatacacagttttgtttcatggaaagtttgtagctctactgctagtg

SEQ ID NO: 433 - protein, 218 aa, Triticum aestivum
MALMLSPAATFLPVATGKPTATAGAMRNLLFTTTSGTASGHRSSRKVVAMADILGDFGARDPFPEEIASNFGEKTLGNVDTLHRILIPTLSVLSLSRVPLEAHPAPLSEEDARRLLFKVVGWRLLFPGKGDSDVLKLECVWKVRDQACGDELIARIGKALDGAGHAPAALLFEPPNQVRAQLCTPSVGGLSANDFIIAARIDQIKTKDLLPKKRVWAC

SEQ ID NO: 434 - DNA, 727 bp, Triticum aestivum
  misc_feature (588)..(588): n is a, c, g, or t
  misc_feature (598)..(598): n is a, c, g, or t
  misc_feature (622)..(622): n is a, c, g, or t
  misc_feature (635)..(635): n is a, c, g, or t
  misc_feature (662)..(662): n is a, c, g, or t
  misc_feature (687)..(687): n is a, c, g, or t
  misc_feature (692)..(692): n is a, c, g, or t
  misc_feature (723)..(723): n is a, c, g, or t
gccgcgcatcatccatccatccgttccactgcaccatggcgctcatgctcagcccggccgcgaccttcctccccgtcgtcgccggcaagcccaccaccgccatgcggaacctcctcttcggcaccaccaccagcaccaccagcggtcaccggagcactcgcaaggtggtggcgatggcggacatcctgggcgacttcggcgcgcgggacccgttcccggaggagatcgcgagcaacttcggggagaagacgctgggcaacgtggacacgctgcaccgcatcctcatccccacgctctccgtgctctccctctcccgcgtcccgctcgacgccgacccggccccgctctccgaggaggacgcccgcaggctgctcttcaaggtggtcggctggcggctcctcttccccagcaagggcgactccgacgtgctcaagctcgagtgcgtctggaaggtccgcgaccaggcctgcggcgacgagctcgtcgccaggatcaacaaggcgctcgacggcgccggccacgcccccgccgcgctccggttcgaggcgcccaaccaagtcagggcccagctctacacgccgtccgtangcgggctgancgccaacgacttcatcatcgcggngaggatcgaccanatcaagaccaaagatctcctcccaaanaagagggtctgggcatgctaatggncgcanattcccctcttcttgctcctcttttgcatanacac

SEQ ID NO: 435 - protein, 215 aa, Triticum aestivum
  misc_feature (185)..(185): Xaa can be any naturally occurring amino acid
  misc_feature (188)..(188): Xaa can be any naturally occurring amino acid
  misc_feature (196)..(196): Xaa can be any naturally occurring amino acid
  misc_feature (200)..(200): Xaa can be any naturally occurring amino acid
  misc_feature (209)..(209): Xaa can be any naturally occurring amino acid
MALMLSPAATFLPVVAGKPTTAMRNLLFGTTTSTTSGHRSTRKVVAMADILGDFGARDPFPEEIASNFGEKTLGNVDTLHRILIPTLSVLSLSRVPLDADPAPLSEEDARRLLFKVVGWRLLFPSKGDSDVLKLECVWKVRDQACGDELVARINKALDGAGHAPAALRFEAPNQVRAQLYTPSVXGLXANDFIIAXRIDXIKTKDLLPXKRVWAC

SEQ ID NO: 436 - DNA, 946 bp, Triticum aestivum
catccatccatccgtccactctccttccttcctttcactacaccatggcgctcatgctcagcccggccgcgaccttcttctccgtcgccggcggcaagccctcctccgccacgaggagcctcttcttcaccaccaccagcaccaccaagggcagaagcgttcgcaaggtggtggcgatggcggacatcctgggcgacttcggcgcgcgggacccgttcccggaggagatcgcgagcaacttcggggagaagacgctgggcaacgtggacacgctgcaccgcatcctcatccccacgctctccgtgctctcgctctcccgcgtgccgctcgacgccgacccggcgccgctctccgaggaggacgcccgcaagctgctcttcaaggtggtcggatggcggctcctcttccccagcaagggcgactccgacgtgctcaagctcgagtgcgtctggaaggtccgcgaccaggcctgcggcgacgagctcatcgccaggatcaacaagacgctcgacggcgccggccatgcccccgccgcgctccagttcgaggcgcccaaccaagtcagggcccagctctacacgccctccgtaggtgggctgagcgccaacgacttcatcatcgccgcgaggatcgaccagatcaagaccaaagatctcctcccaaagaagagggtctgggcatgctaatggcgaccgcccatgccatcttgttcctctttctttgcattgcatacatacacagttttgtttcatggaatggaagccaacctatccaccattgtagctctacccctagtgtttaatgatgatgatgatgccatcgccattttgtcaatcaaatcaaatgatttctcaacttcttaggttcttccgaatgcgaggcacgattacaacaacacttgtataattactaaaatgtcaagaaattcattagctatttaaatgct

SEQ ID NO: 437 - protein, 213 aa, Triticum aestivum
MALMLSPAATFFSVAGGKPSSATRSLFFTTTSTTKGRSVRKVVAMADILGDFGARDPFPEEIASNFGEKTLGNVDTLHRILIPTLSVLSLSRVPLDADPAPLSEEDARKLLFKVVGWRLLFPSKGDSDVLKLECVWKVRDQACGDELIARINKTLDGAGHAPAALQFEAPNQVRAQLYTPSVGGLSANDFIIAARIDQIKTKDLLPKKRVWAC

SEQ ID NO: 438 - DNA, 810 bp, Triticum aestivum
gccacttcaccgcgagccccactgaccctcaaaggcctcaacatggcaggtctgctgctgcgtacattcatccggatccagccccgggcgccgatgagcgccgccggtggagccgcgcccttctacgcctcgtgtccctcgtcgccccgcaccgtcgcgcacctggaggtgaggggggagcaggccgctgctgaagttgaattatcaaagaagagttgtatcccatgcatttcaaaggatctgcatgccatgtcagaagattctgctaaaaagtcacttgaacaggtgactggttgggaactgaaaaatgaaggtgacattttgaaattacacagagcatggaaggtgaagaattttgtaaaaggtcttgagttctttcagcttgttgctgctgttgctgaggaagaaggtcaccacccagatcttcatctcgtcagttggaacaatgtgaaaatcgatgtctggactcattcagtcagaggtttaacagataatgacttcatccttgctgcaaagatcaatgaactcaagctagaaggccttttgagcaagaaaaaggctacttcccaggagtagctttgggagatcaagcagataacttttaatgtgtagatgccaagaaatgcccttttatattgtctgcgatgattgtacatgccgttccaaaatgagtacttccgatgtgaattccacttaccatttggtgagatctatccgttctgggcgatgcgtttctccgatgttgcgaatctaggatcatcctaatacttgtctgtatcttctgaatatataccgtagttgaaggtgtca

SEQ ID NO: 439 - protein, 177 aa, Triticum aestivum
MAGLLLRTFIRIQPRAPMSAAGGAAPFYASCPSSPRTVAHLEVRGEQAAAEVELSKKSCIPCISKDLHAMSEDSAKKSLEQVTGWELKNEGDILKLHRAWKVKNFVKGLEFFQLVAAVAEEEGHHPDLHLVSWNNVKIDVWTHSVRGLTDNDFILAAKINELKLEGLLSKKKATSQE

SEQ ID NO: 440 - protein, 173 aa, Artificial sequence
  PCD-domain in SEQ ID NO: 2
QLAVRRKQKSVVVAMADLLGDFGARDPFPEEIESNFGERVLGNVDTLHNILIPTLSVLSIARLPLEPNPAPVDAADARRLLHKVVGWRLLDDADGMRLQCVWKVRDEACGHELVARINAAVDGAPATVVFEAPNQVRAELQTPSAGGLTVNDFIVAARIDKVKTVDLIPKKRV

SEQ ID NO: 441 - protein, 20 aa, Artificial sequence
  motif 12
  VARIANT (1)..(1): Xaa is Glu or Gly
  VARIANT (2)..(2): Xaa is Asn or Asp
  VARIANT (3)..(3): Xaa is Leu or Phe
  UNSURE (9)..(11): Xaa is any amino acid
  UNSURE (13)..(16): Xaa is any amino acid
  VARIANT (19)..(19): Xaa is Glu or Asp
XXXGARDPXXXEXXXXFGXK

SEQ ID NO: 442 - protein, 40 aa, Artificial sequence
  motif 13
  VARIANT (1)..(1): Xaa is Asp, Lys, His, Gln, Asn or Glu
  UNSURE (2)..(4): Unknown amino acid
  VARIANT (6)..(6): Xaa is Cys, Ser or His
  UNSURE (8)..(12): Unknown amino acid
  UNSURE (13)..(13): Unknown amino acid or gap
  VARIANT (14)..(14): Xaa is Trp, Phe, His or Tyr
  UNSURE (15)..(23): Unknown amino acid
  VARIANT (24)..(24): Xaa is Trp or His
  UNSURE (25)..(32): Unknown amino acid
  UNSURE (33)..(39): Unknown amino acid or a gap
XXXXHXPXXXXXXXXXXXXXXXXXXXXXXXXXXXXXXXXD

SEQ ID NO: 443 - protein, 4 aa, Artificial sequence
  motif 14
  VARIANT (3)..(3): Xaa is Leu or Val
  VARIANT (4)..(4): Xaa is Lys or Arg
WKVR

SEQ ID NO: 444 - protein, 4 aa, Artificial sequence
  motif 15
TDFI

SEQ ID NO: 445 - protein, 6 aa, Artificial sequence
  motif 16
  VARIANT (1)..(1): Xaa is Val or Ser
  VARIANT (2)..(2): Xaa is Ile or Val
  VARIANT (3)..(3): Xaa is Arg, Ser, Ala or Gly
  VARIANT (6)..(6): Xaa is Ser or Thr
XXXGLX

SEQ ID NO: 446 - protein, 9 aa, Artificial sequence
  motif 17
  VARIANT (4)..(4): Xaa is Arg or Phe
  VARIANT (5)..(5): Xaa is Arg or Gly
  VARIANT (6)..(6): Xaa is Ala or Ala
  VARIANT (7)..(7): Xaa is Gly or Arg
LGDXXXXDP

SEQ ID NO: 447 - protein, 7 aa, Artificial sequence
  motif 18
  VARIANT (2)..(2): Xaa is Lys or Arg
  VARIANT (7)..(7): Xaa is Ala or Thr
HXILIPX

SEQ ID NO: 448 - DNA, 51 bp, Artificial sequence
  primer 3
ggggacaagtttgtacaaaaaagcaggcttaaacaatggcgctcaccaacc

SEQ ID NO: 449 - DNA, 52 bp, Artificial sequence
  primer 4
ggggaccactttgtacaagaaagctgggtaaggggatatatgtgaatgaaga

SEQ ID NO: 450 - DNA, 2194 bp, Oryza sativa; identical to SEQ ID NO: 275

SEQ ID NO: 451 - DNA, 1683 bp, Lycopersicon esculentum
atgatttgcattgagaatgaattattgggttggaaagatttcccaaaggggcttaaagtcctacttcttgatgaagatagcaactctgctgctgagatgaaatcaaggcttgagaaaatggactacatagtctactcgttctgcaacgagagcgaagctttgactgcaatctcaagcaaatccgagggctttcatgttgccattgtggaggtaagtgcaggcaacagtgatggggttctacggtttcttgaaagtgccaaagatctaccaactataatgacatcaaatatacattctcttagtaccatgatgaaatgtattgcgctaggcgcagttgagttccttcagaaaccattgtcagatgataaactcaaaaatatatggcagcatgtagttcacaaggcattcaatactagaaaggatgtgtccaaatcacttgagccggtaaaagattctgtcctctcgatgctgcagttacaactagaaatgggtgaagcagatgacaaaagttcaaatggaacagaacctcccactgcagtagcggaaagcaatactgaacagtcatcgggctgtgataaataccctgctccctcaatcccacaattgaaacaaggagtgcgatccgtcgatgatggtgactgccatgatcatactatcttctcaactgaccaagacagtggggaacatgatgctgacactaaatccgtcgaaactacttataacaattcacttgctgagaataatgtccaaacaagtcctactgtacagcaaggagatattattttgaaagaggataatgtttcatctcctgatctaaagacggagactgatatcgctaccacttcacgaagtaacgactgccctgacaatagcattatgcattctgctgaacctagtaaagcatctggtcctcatagttcaaatgggactaaatccaataggaagaagataaaggtagattggacacctgaactacacaagaagtttgttcaagcagtagagcaactcggtatagatcaagccattccttctcgaatactggacctgatgaaagtagagggcttaacgagacataacgtagctagccatctccagaaatacagaatgcatcgaaagcaaattttgccaaaggaagtagaaagaagatggcctaatccgcaaccaatagattcagtccaaagaagttactatcctcataaacctatcatgacattcccacaatatcattctaatcatgttgccccaggtggtcagttctatcctgcttgggtaacaccagcaagttatccgaacggtttacaagtgtggggttcaccttactatccgggatggaaacctgcagagacttggcactggacgcctcgtccagagctgcatgctgatacatggggctcccctatcatgtcaccgtcgcttggatcatatccaccatatcctcagaatgctggagtgtaccggccacatggaacacataacagatatagcatgctagagaagtcgtttgatcttcacccggcggatgaggtgattgataaagtagtaaaagaggcaataaccaaaccatggttaccacttcctttgggcctaaaagctccttcaacggagagcgttcttgacgaactttctagacaagggatctcaaccattccttcacaaatcaacgactcccgttgtcggagatga

SEQ ID NO: 452 - protein, 560 aa, Lycopersicon esculentum
MICIENELLGWKDFPKGLKVLLLDEDSNSAAEMKSRLEKMDYIVYSFCNESEALTAISSKSEGFHVAIVEVSAGNSDGVLRFLESAKDLPTIMTSNIHSLSTMMKCIALGAVEFLQKPLSDDKLKNIWQHVVHKAFNTRKDVSKSLEPVKDSVLSMLQLQLEMGEADDKSSNGTEPPTAVAESNTEQSSGCDKYPAPSIPQLKQGVRSVDDGDCHDHTIFSTDQDSGEHDADTKSVETTYNNSLAENNVQTSPTVQQGDIILKEDNVSSPDLKTETDIATTSRSNDCPDNSIMHSAEPSKASGPHSSNGTKSNRKKIKVDWTPELHKKFVQAVEQLGIDQAIPSRILDLMKVEGLTRHNVASHLQKYRMHRKQILPKEVERRWPNPQPIDSVQRSYYPHKPIMTFPQYHSNHVAPGGQFYPAWVTPASYPNGLQVWGSPYYPGWKPAETWHWTPRPELHADTWGSPIMSPSLGSYPPYPQNAGVYRPHGTHNRYSMLEKSFDLHPADEVIDKVVKEAITKPWLPLPLGLKAPSTESVLDELSRQGISTIPSQINDSRCRR

SEQ ID NO: 453 - DNA, 1656 bp, Aquilegia formosa x Aquilegia pubescens
atggtttgcactgctgatgatttattagggtggaaggattttccaaaaggactaaaagtccttctacttaaagaagacggcatttctgctacagaaataaaatcaaagcttgaagaaatggactatatcgtgtctacacttttcaatttggatgatgctttaatggaaatttcaaacaagcctggaagcttccatgttgctattgtagaggttagcacaaacaatcaacacgaatgtttcaagtttctagaaaccgtgagagatttacccactattatgatttcaaacatccaatgtcttagcaccatgatgaaatgcatcgctcttggtgcggctgaattccttcaacaaccactgtccgaagacaaactcaggaatatatggcagcatgttgttcataaggcctttaatgctaaagaaagtgacctcaccaaatcattgaagcccatcaaagacactgtcgtatccatgcttcagctcccacgagaaacaaatgacactgaggattacaatttgttggaaacagagaattctgcccaatcccgggaatgtgagaatgagcaatcaacagtcagtgataagttcccagctccttcaaccccacagttgaaacaaggatgccgattttcagatgacggggactgccaacaccatactaacttcttggtagacaaagcacatagaggcatcgaaagagaatcaaaatctgtcgacactacttgcaactatttggttgctgaaactacttcggacaattcactcgcagaagttactgtcacagtcgatccatcaacaactgctagtgaggctatgatcaaagaggaagactcgcttgagaattctaggagtggaagcagcttagtttctcatccgcagaggaaagagaataaaacagactccattagcaaggtcaaaaacccaaggagagcatctcttcaccctaatccatgtgggaaaaaatcaaataggaagatgaaggtggactggacaccagacctgcacaaacgttttgtgcaagcagttgagcaactaggtgttgaccaagccattccttctcggatattagacttgatgaaggtagaaggattgacaaggcataatgtcgccagccacctgcagaagtatcggatgcaaaggagacatattgcgccaaaggatgacgatcgaagatggcagcatccaagagactccatccaaagggtttatccacaaaaacccataatggcatatcctccataccatcctaatcatggattttcaacaaatcagttctaccctgtatggggtcatcctagtaatcacctgcagaacatccagatgtggggtcatcctggtttccatacatggcatccagggatgcatgcggatgcatggggccgccctatcttgccattatctcaggggccatattctaactaccctcagaatgcctctggatttcaaaatgtgtatgcatatgaggataataacaacgttccgaagaactcattcgacttcaatccggctgaagaagtaattgacaaggttgtaagagaggcaataaacaagccatggttacccttaccattaggtcttaaatctccatctacagaaatggttctctctgagctccacagacaaggcatatgcaacatccctccacacaatcaatgctga

SEQ ID NO: 454 - protein, 551 aa, Aquilegia formosa x Aquilegia pubescens
MVCTADDLLGWKDFPKGLKVLLLKEDGISATEIKSKLEEMDYIVSTLFNLDDALMEISNKPGSFHVAIVEVSTNNQHECFKFLETVRDLPTIMISNIQCLSTMMKCIALGAAEFLQQPLSEDKLRNIWQHVVHKAFNAKESDLTKSLKPIKDTVVSMLQLPRETNDTEDYNLLETENSAQSRECENEQSTVSDKFPAPSTPQLKQGCRFSDDGDCQHHTNFLVDKAHRGIERESKSVDTTCNYLVAETTSDNSLAEVTVTVDPSTTASEAMIKEEDSLENSRSGSSLVSHPQRKENKTDSISKVKNPRRASLHPNPCGKKSNRKMKVDWTPDLHKRFVQAVEQLGVDQAIPSRILDLMKVEGLTRHNVASHLQKYRMQRRHIAPKDDDRRWQHPRDSIQRVYPQKPIMAYPPYHPNHGFSTNQFYPVWGHPSNHLQNIQMWGHPGFHTWHPGMHADAWGRPILPLSQGPYSNYPQNASGFQNVYAYEDNNNVPKNSFDFNPAEEVIDKVVREAINKPWLPLPLGLKSPSTEMVLSELHRQGICNIPPHNQC

SEQ ID NO: 455 - DNA, 1608 bp, Arabidopsis thaliana
atggtcattaccgctaacgatttatcaaaatgggaaaattttcctaaaggacttaaggttcttcttctcctcaacggctgtgacagcgacggagatggctcctcagccgccgagactcgatcagagctcgaatcaatggactatatcgttactacattcaccgatgaaactgaagcactctctgcggttgtcaagaacccggagagcttccacattgccatcgtcgaggtgaatatgagcgctgagagtgagagtttcaagtttcttgaggctgccaaagacgttcttcctactataatgatttcaaccgatcattgcatcactactacaatgaaatgcatagcgcttggtgcagttgagttcctacaaaaaccgctctcaccggagaaattaaagaacatttggcagcatgttgttcataaggcattcaatgatggtggaagtaatgtttcgatatcacttaagccagtgaaagaatccgttgtctcgatgcttcatcttgagaccgacatgacaatcgaggagaaagatccagcgccatcaacaccgcaattgaaacaagattcacggttactagacggtgattgccaagagaacataaatttctcgatggaaaatgtaaattcctcgaccgagaaagataacatggaagatcatcaagacatcggtgaatctaaatcagtcgacactacaaaccgcaaattagatgacgacaaagtggttgtcaaagaagagagaggagacagtgaaaaagaagaagaaggtgaaaccggagatctcataagcgagaagacagattcagttgatattcataagaaagaagatgagactaaaccgattaataaatcatccgggatcaagaacgtgtctggtaacaaaactagtcgaaagaaggtggattggacaccagagctgcacaagaagtttgtgcaagcagttgagcaactcggcgttgatcaagcgataccctcgcggattcttgagttgatgaaagtaggcaccttaacaagacacaatgtagctagtcaccttcagaaatttcggcagcataggaagaatattcttccaaaggatgatcataaccatagatggatacaatctagagagaaccatagaccaaatcaacgtaattataacgtttttcaacagcaacaccgtcccgtgatggcttatcccgtttggggtcttcccggtgtttatccgccaggagcgattccacctttgtggccaccgccgctgcagtccattggtcaaccacctccgtggcattggaaaccaccttatccaacggtgagcggtaatgcatggggttgtccggttggaccgcctgtgaccggatcatatattactccttcgaatactaccgccggcggatttcaatatcccaacggagctgaaaccggcttcaaaataatgccggcgagtcagccggacgaggaaatgttagatcaagtggttaaagaagcgataagcaaaccgtggctgccgctaccgctcgggctaaaaccgccgtccgcggagagcgttttggctgagctaacgcgtcaaggcatctcagccgtcccttcttcttcttgtctaatcaacggctctcatcgtctccgctga

SEQ ID NO: 456 - protein, 535 aa, Arabidopsis thaliana
MVITANDLSKWENFPKGLKVLLLLNGCDSDGDGSSAAETRSELESMDYIVTTFTDETEALSAVVKNPESFHIAIVEVNMSAESESFKFLEAAKDVLPTIMISTDHCITTTMKCIALGAVEFLQKPLSPEKLKNIWQHVVHKAFNDGGSNVSISLKPVKESVVSMLHLETDMTIEEKDPAPSTPQLKQDSRLLDGDCQENINFSMENVNSSTEKDNMEDHQDIGESKSVDTTNRKLDDDKVVVKEERGDSEKEEEGETGDLISEKTDSVDIHKKEDETKPINKSSGIKNVSGNKTSRKKVDWTPELHKKFVQAVEQLGVDQAIPSRILELMKVGTLTRHNVASHLQKFRQHRKNILPKDDHNHRWIQSRENHRPNQRNYNVFQQQHRPVMAYPVWGLPGVYPPGAIPPLWPPPLQSIGQPPPWHWKPPYPTVSGNAWGCPVGPPVTGSYITPSNTTAGGFQYPNGAETGFKIMPASQPDEEMLDQVVKEAISKPWLPLPLGLKPPSAESVLAELTRQGISAVPSSSCLINGSHRLR

SEQ ID NO: 457 - DNA, 1674 bp, Eucalypus grandis
atggtttgcactgccagtgatctacaagaatggaaggacttcccaaagggactcaaggtccttcttcttgaccaggactctgattctgcttcagagataagatcaaagctggagttaatggactatgttgtttttacattctgcaatgaggacgaggctctatcggcaatagctagcaaacctgatagcttccacatagctatggtcgaggtgagtacaagcagtaatgggagtttcgagttcctcgaagctgctagagacttgcctaccatcatgatgtcaaataaccattgtctcagcaccatcatgaagtgtatagctcttggtgcggtcgagttcctccacaaaccgctctgcgaggacaaactcaggaatatttggcagcatgtcgcccacaaggcatttaatgcaggggtcagcgaggtctcggagtctttgaaacttgtcaaagaaacttcggtctccatgttgcagcaccaattgaaaaatgaggagcagaacaatgacgagtcaagagaaatgagaaaactgtctgttcatgaaactgatcaagagatgtccgctgcgagtgataagtatcctgcaccatcgactccacagttgaagggaggtgcacggctcctagatgatggggattgccaagatcaaacgaatggaacggtcgagaaggagagtggggagcaagatggagagtcaaaatttgtcgaaacaacttgtgatgattcaatgtctgagaatatccaggaagctcaaggccagagagatagggatgttctggtaaaagaagaggatgattcagccaacaattccaagtgcgagagcatgatatctccgctgtccgaaaacaaagataggtcccacgatgtacatggttgcaatgataatcaaagcaaagcatccagtcttcataattctgccagaacacgggttaacaggaagaagatgaaggttgactggaccccagaactgcacaagaaatttgtgcaggcggtggagcagctaggcgtggaccaagccataccttcttgcatactcgaccttatgaaagtcgaaggcctgacgaggcacaatgtggcgagtcatctccagaaataccgaatgcataggagacacatcttgcccaaggaagatgaacgcagatggccacattctcgcgatggtgtcaccaggagttactatccgcatcgacctatcatggcctatccgactcaccatcctggtcacccccttccaccaggagcagcctatcctgtgtggggggcaccgcccagtaatcatccagccggcatgcagatgtgggggccgcctggctatccgccatggccatctccagaaaactggcattggaagactgcctatcctgcgatgcaagccgacgtgtggggttgcccagtgatgccatcttctcatcacggtcccagctttgcctttcctcagaatgcacccgtttgccatccccccgacggattggaaaacagcttcgctggaaattcgttcgactatcatccggacgaggaagtgattgacaacatcgtgaaagaggcgataagcaagccgtggctgcccttgccgctggggctcaagccgccttccaccgactgcgtcctcgccgagctctccaggcaaggcatccccagcattcctccccatgccgaccagctcggcccatgctga

SEQ ID NO: 458 - protein, 557 aa, Eucalypus grandis
MVCTASDLQEWKDFPKGLKVLLLDQDSDSASEIRSKLELMDYVVFTFCNEDEALSAIASKPDSFHIAMVEVSTSSNGSFEFLEAARDLPTIMMSNNHCLSTIMKCIALGAVEFLHKPLCEDKLRNIWQHVAHKAFNAGVSEVSESLKLVKETSVSMLQHQLKNEEQNNDESREMRKLSVHETDQEMSAASDKYPAPSTPQLKGGARLLDDGDCQDQTNGTVEKESGEQDGESKFVETTCDDSMSENIQEAQGQRDRDVLVKEEDDSANNSKCESMISPLSENKDRSHDVHGCNDNQSKASSLHNSARTRVNRKKMKVDWTPELHKKFVQAVEQLGVDQAIPSCILDLMKVEGLTRHNVASHLQKYRMHRRHILPKEDERRWPHSRDGVTRSYYPHRPIMAYPTHHPGHPLPPGAAYPVWGAPPSNHPAGMQMWGPPGYPPWPSPENWHWKTAYPAMQADVWGCPVMPSSHHGPSFAFPQNAPVCHPPDGLENSFAGNSFDYHPDEEVIDNIVKEAISKPWLPLPLGLKPPSTDCVLAELSRQGIPSIPPHADQLGPC

SEQ ID NO: 459 - DNA, 1713 bp, Glycine max
atggtttgcactgccaatgatttacaaggatggaaagatttcccaaagggacttagagttcttctgcttgaaggagatagtagttctgctgctgagataagagaacaacttgaggccatggactataaggtttccactttctacgacgagaatgaagccttgtcagcactctcaagtagtcctaaaggcttccatgttgccatagtggaggtgagtacaagctgtagccttggaggtttcaaatttcttgagaatgcaaaggacttgcctaccattatgacttcaaaggaccagtgcctgaacaccatgatgaagtgcattgcgcttggtgcagttgagtttctcagtaaaccactctctgaggacaagctcaaaaatatttggcagcatgttgttcacaaggcatttaatgctggggcaaatgtcctgtctgaatcactaaaacctgtcaaagaatctgtagaatccatgctgcagcttcaaacagaaaatggacaagataaaagtaggatttcaattgatttagaaaatgtgtcgaggtttagtgatattgaccatgagcagtctgctgtatgtgataaatatccggctccgtcaacccctcaattaaagcaggggacaaggttactggatgatggagattgccatgatcagactaattgctcaacagaaaaagaaagtggggaacatgatagggaatgtaaatctgtcgaaacttcatgtgggaatttgaatgctgaaagttctcctcagccaagggaacctgataagactctgattagggaggaagatgattttgccaatgtttccaagggtgagagcgctgtttcactgaatccacataataaaaagtttctcagcaatgccgatggtaatacatctccaaataaaacgggtgtacttaatgattcatgtgagattaaagctaatcggaagaaggtgaaagtagactggacacctgagctgcataaaaaatttgtaaaggctgtcgaacaactaggtattgatcaagccattccttctagaatattggagataatgaaagtggaaggtttgacaaggcacaatgtggcaagccatcttcagaaatatagaatacacaagagacaaagtgcacccagagaagaagatcggaaatggcataatcaaggggatgcaatgcaaaggaactattatatgcaaagaccaatcatggcataccctccatatcattcacatcacaccctttctccagctcctatatatcctatgtggggacaacctggcagtcaaacagccggtgtacagatttggggccatcctggttatcccatatggcatcctacagaaagttggcactggaagccttatccgggggtgcatgtggatgcttggggatgcccgttggtgccacctcctcaagctccttgttttccctacaatcaaaatacacctggattgcacaatcctaaagcagttgactatagattcagcatgccacgaagttcctttgagcatcatccggcagaggaggtggtagacaaggtagtgaaggaagcaatgagccagccatggctaccattgcccttaggactcaaacctccttccatggatagtgtgttggctgaactctccaaacaaggcatacccagcatccctcttggcaacaagggttcttctactcctaaaccccgtcgagatgtacgaccgaccccgccaccgggtcccacatag

SEQ ID NO: 460 - protein, 570 aa, Glycine max
MVCTANDLQGWKDFPKGLRVLLLEGDSSSAAEIREQLEAMDYKVSTFYDENEALSALSSSPKGFHVAIVEVSTSCSLGGFKFLENAKDLPTIMTSKDQCLNTMMKCIALGAVEFLSKPLSEDKLKNIWQHVVHKAFNAGANVLSESLKPVKESVESMLQLQTENGQDKSRISIDLENVSRFSDIDHEQSAVCDKYPAPSTPQLKQGTRLLDDGDCHDQTNCSTEKESGEHDRECKSVETSCGNLNAESSPQPREPDKTLIREEDDFANVSKGESAVSLNPHNKKFLSNADGNTSPNKTGVLNDSCEIKANRKKVKVDWTPELHKKFVKAVEQLGIDQAIPSRILEIMKVEGLTRHNVASHLQKYRIHKRQSAPREEDRKWHNQGDAMQRNYYMQRPIMAYPPYHSHHTLSPAPIYPMWGQPGSQTAGVQIWGHPGYPIWHPTESWHWKPYPGVHVDAWGCPLVPPPQAPCFPYNQNTPGLHNPKAVDYRFSMPRSSFEHHPAEEVVDKVVKEAMSQPWLPLPLGLKPPSMDSVLAELSKQGIPSIPLGNKGSSTPKPRRDVRPTPPPGPT

SEQ ID NO: 461 - DNA, 1674 bp, Lotus japonica
atggtttgcactgccagtgatttacagcaatggaaagattttccaaaagggcttcgggttcttcttcttgaaggagatagcggttctgctaccgagataagagcaaagcttgaggccatggactatattgtttttactttctacaatgagaatgaggccttgtcagcaatctctagtgatcctgaaggcttccatgttgccgtggtggaggtgtctacaagcagcaaccagggtggtttcaaattccttgagaatgtgaaggacttgcctaccattatgacttccaacagtcaatgcctgaatacaatgatgaagtgcatcgcgcttggcgcagttgaattcctcactaaaccactctctgaggataagctcaaaaatatttggcagcatgtagttcacaaggcattcaatgctgggacaaatgctccgtctgaatcactaagacctgtcaaagaatctgtagagtccattttacagctccaaactgataatggacagcatgaaagtaatatttcaatagatatagagaacgtgtccaggttaggtgataatgaccatgagcagtcggttggaagtgataaatatccggctccttcaaccccgcaattaaaacaaggggcaaggttactagatgatggtgattgccatgagcaaactaattgctcaacagaaaaagaaagtggggaacatgatgaggaatctaaatctgtcgaaatttcttgtgagaatttaaacacggaaagttcttctcagcttagtaaacctgaaaagactctgattaaggaggaagaggcttttgccgatggttccaagggtgagattgctgtttcacagaatgaagataatagaaagtttctcggcagtgctgagggtaatgaatctccaaataaaacaggtgttcttagtgattcctgtgagaagaaagctaatcggaagaagatgaaagttgactggacacctgaattgcacaagaaatttgtaaaggcagtggaacagttgggtattgatcatgccatcccgtctcgaatattggagatcatgaaagtggagggcttgacgaggcacaatgttgcaagccatcttcagaaatatagaatacacaagaaacaaatcatgcctggggaagacgaccgaaaatgtcagaatccaagagatccaatgcaaaggagctattgtttgcaaagaccaatcatggcctacccaccatatcattctaaccacacccttcctccggctcctatgtatccaatgtggggacaacctggcagtcaaacagctggtgtgcagatttggggtaatcatggttatcccctttggcatcctacagaaagttggcactggaagccatatcccggaatgcatgtggatgcatgggggtgtccagtgttgccatctcctcaagcttctccttttccctacactcacaatgtggctgggtggcacaatgctaaagcaatggattatagattcagcatgccacagagttctgtagagaattatccggcggaggaggtggtggacaaggttgtgaaggaggcaatgagcaagccatggctccccttgcccttaggcctcaaacctccttccatggatactgtcttgtctgagctctccagccaaggcatatccggcatcatcccttttagcagcaccaagggctctataccccgctga

SEQ ID NO: 462 - protein, 557 aa, Lotus japonica
MVCTASDLQQWKDFPKGLRVLLLEGDSGSATEIRAKLEAMDYIVFTFYNENEALSAISSDPEGFHVAVVEVSTSSNQGGFKFLENVKDLPTIMTSNSQCLNTMMKCIALGAVEFLTKPLSEDKLKNIWQHVVHKAFNAGTNAPSESLRPVKESVESILQLQTDNGQHESNISIDIENVSRLGDNDHEQSVGSDKYPAPSTPQLKQGARLLDDGDCHEQTNCSTEKESGEHDEESKSVEISCENLNTESSSQLSKPEKTLIKEEEAFADGSKGEIAVSQNEDNRKFLGSAEGNESPNKTGVLSDSCEKKANRKKMKVDWTPELHKKFVKAVEQLGIDHAIPSRILEIMKVEGLTRHNVASHLQKYRIHKKQIMPGEDDRKCQNPRDPMQRSYCLQRPIMAYPPYHSNHTLPPAPMYPMWGQPGSQTAGVQIWGNHGYPLWHPTESWHWKPYPGMHVDAWGCPVLPSPQASPFPYTHNVAGWHNAKAMDYRFSMPQSSVENYPAEEVVDKVVKEAMSKPWLPLPLGLKPPSMDTVLSELSSQGISGIIPFSSTKGSIPR

SEQ ID NO: 463 - DNA, 1680 bp, Lycopersicon esculentum
atggtttgcactgagaatgaattattggagtggaaagatttcccaaaaggacttaaagttcttcttcttgatacagactccaattttgcctcacagatgagatcaaggcttcaacaaatggactatatagtttacacattctgcaatgagaatgaggctctgtctgcaatatcaagcaagtcggaggtgttccatgttgccattgtagaggtaagtgctggcaacagcgatggaggattcaaatttctcgaaagtgctaaagatctaccaactataatggtttcagatattcactctattaacatcatgatgaagtgtatagcacttggtgcagttgagttccttcagaaaccattatcagatgataaactgagaaatatatggcagcatgtagttcacaaggcatttcattctggaggaaagagtgtctctgagtcactaaagccggttaaagaatctcttttgtccattctagagctccaaccagtaaaacacgaagcagataatgagaatactaatgaagcagaacccttgatatcagtggtggaaaaccaaaaagcatcatcatcctgctgcgataaatatccagctccttcaaccccacaacagaaacaaggagtgaggtcagtggatgatgttgattaccaagatcatactatcttgtcaaatgaacaagatagtgggatgcatgaaggggacacaaaatctgtcgaaactacttcttgcgattctgttgctgagactactgtcttggcagattcttccgagcgtctaggagaggctatcacaaaggaggaacactattctgctgctgatcaacatatggaggatcctattgctacttgttcaccaagtaatgacaatggcagtacttgttctgctgacccgaacaaagcttctggtctccatagttcaagtgggacaaaagctaataagaagaaaatgaaggtagactggacacctgaactacacaagaaatttgttaaagcagtagagaaaattggtatagatcaagccattccttctcgaatactggagctgatgaaagtagaaggcctgacgagacataatatagctagccatctccagaaattcaggatgcagcggaagcaaatcttgccaaaggaagacgaaagaaggtggcctcgtcctcaacctagagatcctgtacagaggacctattatccacataaacctgtcatggcctttccaacccatcattccaaccatgcaaccacagctggtcaattctatcctgcctggataccaccaggaggttacccgaatggtgcacatatgtggaattcgccttattatcatggatggcaaccgcctgagacgtggcactggaatcctcaaccagggctgtatgctgatgtatggggttgccccgttacgcctccatctttaggatcatgtacaccataccctcagaatgcatctggatttcacagggctgagggaatgctgaatggatatagcataatacagaaatcagtcgatcttcacccggcagaggaggtgatagataaagtggtgaaggaggcaataaacaagccatggttgcctctacccttgggcctaaaacctccttcaacggagagtgttctcgacgcgctttctaaacaaggcatccccgccgtccctccacgccaccaccgctctcatcgcccacactga

SEQ ID NO: 464 - protein, 559 aa, Lycopersicon esculentum
MVCTENELLEWKDFPKGLKVLLLDTDSNFASQMRSRLQQMDYIVYTFCNENEALSAISSKSEVFHVAIVEVSAGNSDGGFKFLESAKDLPTIMVSDIHSINIMMKCIALGAVEFLQKPLSDDKLRNIWQHVVHKAFHSGGKSVSESLKPVKESLLSILELQPVKHEADNENTNEAEPLISVVENQKASSSCCDKYPAPSTPQQKQGVRSVDDVDYQDHTILSNEQDSGMHEGDTKSVETTSCDSVAETTVLADSSERLGEAITKEEHYSAADQHMEDPIATCSPSNDNGSTCSADPNKASGLHSSSGTKANKKKMKVDWTPELHKKFVKAVEKIGIDQAIPSRILELMKVEGLTRHNIASHLQKFRMQRKQILPKEDERRWPRPQPRDPVQRTYYPHKPVMAFPTHHSNHATTAGQFYPAWIPPGGYPNGAHMWNSPYYHGWQPPETWHWNPQPGLYADVWGCPVTPPSLGSCTPYPQNASGFHRAEGMLNGYSIIQKSVDLHPAEEVIDKVVKEAINKPWLPLPLGLKPPSTESVLDALSKQGIPAVPPRHHRSHRPH

SEQ ID NO: 465 - DNA, 1647 bp, Medicago truncatula
atggtttgcactgccaatgatttacaaggatggaaagatttcccaaaaggacttagggttcttctccttgaaggagacaacaattctgcttctgaaataagaacaaagcttgaatctatggactataatgtttctacgttctacaatgaaaatgaagccttgtcagcaatctcaagtagtcccaaatgcttccatgttgccatagtggaggtgagtataagctgccctgatggaggtttcaaatttctcgagaatgcaaaagacttgccaaccattatgacgtcgaatagtcagtgcataaacacaatgatgaagtgcatcgcgcttggtgcagttgagttcctcactaaaccactttctgaggacaagctgaaaaatatttggcagcatgtggttcacaaggcattcaatgccgaggcaagcgctctgtctgaatcacttaaaccggtcaaagaatctgtagagtccatgttgcatctccaaacagacaacacactacatgaaagtacaatatcaatagatttagataaggtgtccaagtttagtgataatgaacatgagcattctgcggcaagcgataaatatccggctccttccaccccgcaattaaaacaaggggcaaggttagtggatgatggtgattgccacgagcagactaattgcttaatagaaaaagaaagtggggaacatgacagtggtgaatgtaaatttgtcgacacttcatgtgagaatttgaatgctgaaagttctcctcaacctacaaaacatctgattaaggaggaagaagattttgccaagggttccaagggtgagggtggtgcttcattgaatccacttaataaaaattttctcggcgacgctggtggcaatacatctctgaataaaacaagggtttttaacgatccgtgtgagaataaagctaatcggaagaagatgaaagtagactggacagctgagctgcacaaaaaatttgtgaaggcagtggaacaactaggtattgatcaagccattccttctcgtatattggagttaatgaaagtcgacggtttgacaaggcataatgtggcaagccatcttcagatttttgttgaacagaaatatagaatgcacaagagacagatcatccacacggacgaagatcgaaaatggccaaatcgaagagatcctatgcaaaggaactattgtatgcaaagaccgattatggcttatccaccatatcattctaatcacacctttcctccagctcctgcatatcccatgtggggccaacatggaagtcaaacagctggtgtaccgatttggagtcctccgggttatcctctatggcagcctacagaaagttggcattggaagccatatccgccaggggtgcatgtggatgcatggggtaacccaatgttgcgcccacctcaaactcactgtattccatacactcaaaatatggctgggatgcacaatgctaaagcagtggattatagttatccggcagaggaagtggtggacaaggctgtgaaggaggcaataaacaagccatggctacctttacctataggcctcaaacctccttcaatggatagtgtgttggatgaactttccaaacaaggcattccttttagcaagaagagcaagggctctagaccatgctga

SEQ ID NO: 466 - protein, 548 aa, Medicago truncatula
MVCTANDLQGWKDFPKGLRVLLLEGDNNSASEIRTKLESMDYNVSTFYNENEALSAISSSPKCFHVAIVEVSISCPDGGFKFLENAKDLPTIMTSNSQCINTMMKCIALGAVEFLTKPLSEDKLKNIWQHVVHKAFNAEASALSESLKPVKESVESMLHLQTDNTLHESTISIDLDKVSKFSDNEHEHSAASDKYPAPSTPQLKQGARLVDDGDCHEQTNCLIEKESGEHDSGECKFVDTSCENLNAESSPQPTKHLIKEEEDFAKGSKGEGGASLNPLNKNFLGDAGGNTSLNKTRVFNDPCENKANRKKMKVDWTAELHKKFVKAVEQLGIDQAIPSRILELMKVDGLTRHNVASHLQIFVEQKYRMHKRQIIHTDEDRKWPNRRDPMQRNYCMQRPIMAYPPYHSNHTFPPAPAYPMWGQHGSQTAGVPIWSPPGYPLWQPTESWHWKPYPPGVHVDAWGNPMLRPPQTHCIPYTQNMAGMHNAKAVDYSYPAEEVVDKAVKEAINKPWLPLPIGLKPPSMDSVLDELSKQGIPFSKKSKGSRPC

SEQ ID NO: 467 - DNA, 1671 bp, Populus tremuloides
atggtttgcaccactaatgatttatcagcatggaaggattttccaaagggcctcagagtccttctccttgatgaggacagcatgtctgctgccgagataaaatcgaaactggaagcaatggactatattgtttatacattctgcaatgagactgaagcgctctctgcaatttcaaatgaacctggaagcttccatgttgctatagtggaggtgagcatgagcaatagcagcaggagtttcaagtttctagaaacttcgaaggacttgccaaccattatgacttcaagcattgattgcctgaacaccatgatgaagtgcatagcgcttggtgcagttgaattccttcggaaaccactctctgaagataaactgaggaatatatggcagcacgtcgttcataaggcatttaatgcaggggggagtgttcagtccaaatcactgaagcctgtcaaagattctgtagtttccatgctggagctcaaagatggactcgaagaaaatgagaataagaacatggagaaaacagaaaatgtgtctcaggctcaggaaagtaatgagcagcagtcaccagctagtgacaagtatccggctccttcaacccctcaattgaaacaaggagagagactgctggatgatggagattgccaagaccatattaactgtttaatagaaaaggagagtgtggagcaagagggagattctaaatccgttgaaactacttgtgccatgtctgaagaaactctacaggcaggggatcctcagagctttacagagactgtgatcaaagaggaggatgactcaactgatggtgtcaagagtgagaataacatgtgtcccaattcacaaaataaagacactctcaaccattcaaatggttgtgctgaaaaagcttctagccttcataattcccatgggactagagctaatagaaagaagatgaagtttcaggtagactggacaccagagcttcacagaaagtttgtgcaggcagtggaaaaactaggtgtagatcaagcgattccttcaagaatattagaggtaatgaaagtggaaggcttgacgaggcataatgtagcaagtcatctgcagcagaaatatcgaatgcacaggagacatattttgcccaaggaagatgaacggcagtggacgcagcatagagatcaagtacaaaggagttactatccacataaacctatcatggcgtatcctccatatcattctaaccatgctctcccacctggtccggtctatcctatgtggggagcaacaggtagtcacacagctggggtgcatatgtggggcccccccggctactccccatggcccccgacagaaagttgtcattggaagccttatccagggatgcatgcagatgcgtggggttgccctgtgatgccaccacataatccttattctaccattcctcattatgcatctgggtttcagagtgccagcatggtcaataacagctgtggtatgccacaaaaactgtttgacctacagccggccgaggaggttatcgacaaggtagtgaaagaggcaatcaacaagccatggctacctttgcccttgggcctcaagcccccgtctgccgatagcgtcctagcagagctctccaggcaaggcgtctcatcaattcctccccgcattaatggctctaattccttctaa

SEQ ID NO: 468 - protein, 556 aa, Populus tremuloides
MVCTTNDLSAWKDFPKGLRVLLLDEDSMSAAEIKSKLEAMDYIVYTFCNETEALSAISNEPGSFHVAIVEVSMSNSSRSFKFLETSKDLPTIMTSSIDCLNTMMKCIALGAVEFLRKPLSEDKLRNIWQHVVHKAFNAGGSVQSKSLKPVKDSVVSMLELKDGLEENENKNMEKTENVSQAQESNEQQSPASDKYPAPSTPQLKQGERLLDDGDCQDHINCLIEKESVEQEGDSKSVETTCAMSEETLQAGDPQSFTETVIKEEDDSTDGVKSENNMCPNSQNKDTLNHSNGCAEKASSLHNSHGTRANRKKMKFQVDWTPELHRKFVQAVEKLGVDQAIPSRILEVMKVEGLTRHNVASHLQQKYRMHRRHILPKEDERQWTQHRDQVQRSYYPHKPIMAYPPYHSNHALPPGPVYPMWGATGSHTAGVHMWGPPGYSPWPPTESCHWKPYPGMHADAWGCPVMPPHNPYSTIPHYASGFQSASMVNNSCGMPQKLFDLQPAEEVIDKVVKEAINKPWLPLPLGLKPPSADSVLAELSRQGVSSIPPRINGSNSF

SEQ ID NO: 469 - DNA, 1650 bp, Populus tremuloides
atggtttgtaccactaatgatttatcagcatggaaggattttccaaagggcctcagtgtccttctccttgatgaggacaacagttctgctgctgagataaaatcgaaactggaagcactggactatatcgtttatacattctgcaatgagaatgaagcgctcttagcaatttcaaatgaacctggaagcttccatgttgctatagtggaggtgagtacgagcaatagcaatgggagtttcaagtttctagaaactgccaaggacttgcctaccattatgacttcaaacattcattgcctgaacaccatgatgaagtgcatagcgcttggtgcagttgagttccttcggaaaccactctctgaagataaactaaggaatatatggcagcatgtggttcataaggcatttaatgcaggtgggagtgttcaatccgaatcactaaagcctgtcaaagattctatagtttctatgcttgagctcaaagtggaacttgaagaaaacgaggatgagaacatggagaaaacagaaaatgcgtctttggctcaggaaagcaatgagcagcagtcaccagctagtgataagcatccagctccttcaacttggcaatttaaacaagtagggcggctgctggatgatggagattgccaagaccatattaactgctcagtagaaaaggatagtggggagcaagagggggaatctaaatctgtcgaaacaacttgtgccatgtctcaagaaactctaaaagcagggcatcctccatgctttatagagactgtgatcaaagagacaggtgacttaactgatggtgccaagagtgagaataacatacatcccaatccacaaaataaagacagtctcaaccattctaatgatgttgcttctgatcttcatacttccaatgggactagagctaatcgaaagaagatgaaggtagactggacaccagagcttcacaaaaaatttgtgcaagtggtggaaaaactaggtgtagatcaagcaattccttcacgagtattagagctaatgaaagtggaaagcttgactaggcataatgtagcaagtcatctgcagaaatatcgaatgcgcaggaggcctattttgcccaaggaagatgaccggcgatggccacaccatagagagcaagtacaaaggagctattatccatataaacctatcatggcataccctccatatcattctaaccatgatcttccaaccaacccggtctatcctatgtggggagcaacaggtagtcacacagctagcatgcatacgtggggcacacccagctatctcccatggcccccaacagaaatttggcacaggaagccttatctagggatgcatgcggatgcatggggttgccctgtgatgccaccattgcatagtcctttttcttcttttcctcaaaatgcatctgggtttcaaagtgccagcatggtcgataacagctgtggcatgccacaaaaaccttttgacctacaaccggccgaggaggtgatcaacaaggtagtgaaagaggtaatcaacaagccttggctaccgttgcccataggcctcaagcccccttctacagatagcgtcctagcggagctctccaggcaaggcatctcatcaattcctcccctttgctctaattccttctaa

SEQ ID NO: 470 - protein, 549 aa, Populus tremuloides
MVCTTNDLSAWKDFPKGLSVLLLDEDNSSAAEIKSKLEALDYIVYTFCNENEALLAISNEPGSFHVAIVEVSTSNSNGSFKFLETAKDLPTIMTSNIHCLNTMMKCIALGAVEFLRKPLSEDKLRNIWQHVVHKAFNAGGSVQSESLKPVKDSIVSMLELKVELEENEDENMEKTENASLAQESNEQQSPASDKHPAPSTWQFKQVGRLLDDGDCQDHINCSVEKDSGEQEGESKSVETTCAMSQETLKAGHPPCFIETVIKETGDLTDGAKSENNIHPNPQNKDSLNHSNDVASDLHTSNGTRANRKKMKVDWTPELHKKFVQVVEKLGVDQAIPSRVLELMKVESLTRHNVASHLQKYRMRRRPILPKEDDRRWPHHREQVQRSYYPYKPIMAYPPYHSNHDLPTNPVYPMWGATGSHTASMHTWGTPSYLPWPPTEIWHRKPYLGMHADAWGCPVMPPLHSPFSSFPQNASGFQSASMVDNSCGMPQKPFDLQPAEEVINKVVKEVINKPWLPLPIGLKPPSTDSVLAELSRQGISSIPPLCSNSF

SEQ ID NO: 471 - DNA, 1674 bp, Vitis vinifera
atggtttgcactgctaatgatttacaggagtggaaggattttcctaagggacttagggtccttctccttgatgatgacactacttctgctgctgagataagatcaaagcttgaggaaatggactatattgtttctacattctgcaatgagaatgaagctttgtcagcaatttcaagcaaacctgagagcttccatgttgctattgtagaggtcagtacaggcaacaatgggagtttcaagtttctcgaaactgctaaggatttacccaccattatgatttcaagcatccattgcctgagcaccatgatgaagtgcatagcactcggtgcagttgagttccttcgaaaaccactgtccgaggacaagctcaggaatatttggcagcatgtagttcataaggcatttaatgcaggagggagtgtccttcctgaatcactaaagcccgtcaaagaatctgtggcttccatgctgcagctccaaatggaaaatgaagaaccaaggaatgaaagctcagcagaaacactgaatgtgtccaatgtccatgaaaatgaccatatgcagtcagctggaactgataaatacccggcaccttcaaccccacaattaaaacaaggagggagatcattggatgatggggattgcctagatcaaactaactgctcaactgagaaagagagtggggagcaggatggggaatctaaatctgtcgaaactacatgtggcacttcagttgctgaagttactgctcaggtgtctccacctcaaggactgggcgagagcgttatcaaagaggaagatgattcagctgatggctgtaagagtgaaagtaatatgtctcctcatccacagaataaagacagtctcagtgagtttggtggtgatgctagaaacccsagaaaggcatctggtgttcatagtccttgtgggacaagagccaatcggaagaaaatgaaggtagactggacgcctgaactgcacaagaaatttgtgcaggcagtggagcagctgggtgtggatcaagccattccatctcgaatattagagctgatgaaagtggaaggcttgacgaggcataatgtagcaagtcatctccagaaatacagaatgcatcggagacacattctgccaaaggaagatgatagaagatggcctcatcagagagacccaatgcagaggaattattatccacagaaacctgtcatggccttccctccatatcattccagtcacaccctcccagctgctcagctctaccctgtatggggccaacccagcagccaccctgctcagatgtggagcacacctggctatcatacatggcagcccgcagaaagttggatttggaagccttatccagggatgaatgccgatgcatggggctgccctgtgatgacaccaacacatactccatgctcttcctttcctcaaaatccatctgggtttgatcataataatggaagtggaatatacaacactggcataccacagagccctattgacctttatccggcagaggaggtaattgacagggtagtgaaggaggcaataagcaagccgtggatgccactgccattgggcctgaaaccgccggccaccgagagcgtgctggcggagctctcccgccagggcatctccaccatcccacctcacatcaacaccccccgtccctactga

SEQ ID NO: 472 - protein, 557 aa, Vitis vinifera
MVCTANDLQEWKDFPKGLRVLLLDDDTTSAAEIRSKLEEMDYIVSTFCNENEALSAISSKPESFHVAIVEVSTGNNGSFKFLETAKDLPTIMISSIHCLSTMMKCIALGAVEFLRKPLSEDKLRNIWQHVVHKAFNAGGSVLPESLKPVKESVASMLQLQMENEEPRNESSAETLNVSNVHENDHMQSAGTDKYPAPSTPQLKQGGRSLDDGDCLDQTNCSTEKESGEQDGESKSVETTCGTSVAEVTAQVSPPQGLGESVIKEEDDSADGCKSESNMSPHPQNKDSLSEFGGDARNPRKASGVHSPCGTRANRKKMKVDWTPELHKKFVQAVEQLGVDQAIPSRILELMKVEGLTRHNVASHLQKYRMHRRHILPKEDDRRWPHQRDPMQRNYYPQKPVMAFPPYHSSHTLPAAQLYPVWGQPSSHPAQMWSTPGYHTWQPAESWIWKPYPGMNADAWGCPVMTPTHTPCSSFPQNPSGFDHNNGSGIYNTGIPQSPIDLYPAEEVIDRVVKEAISKPWMPLPLGLKPPATESVLAELSRQGISTIPPHINTPRPY

SEQ ID NO: 473 - DNA, 1863 bp, Oryza sativa
atggcggagaacaacggcgcggtgcctcccggctgcaagctcccggcgggaggattcttcgggaggctgcacgtgctcgtcgtcgacgacgacgccgcctacctcgaggagctcaagcttatgctgctcctcgccggctacgcagtgacgggcaagacgacggcggaggaagcgctgaaagaggtggaccagaatccggaggattacttccacatcgtcatgaccgacgtccacatgtcaggaatggacggcttcgatctcctccacaggatcaacggccgggtccctgtcatcatgttctccgagggcgaagatgtggtgatggtgatgaggacggtgatgaacggcgcatgcgactacatggtgaagccgatgacatcagaggcgatcaagttcatatggaagcacgtcctgcgctggaggctcagcgccctccccgcgaatgcctcatcatccctgcagccaagcgatcacctggcggcggctctagcggctgtggcgccgccgccgccgccggcggtgcagctgccggccgcaccggcgcaggctgggaacagggatggcgaagctcatgaggaggcagagttgtcgacacagcctcctgcgctggtgccatctggcgttcaagaggcggctgcagcggtatggagcagccgtggtgatggacaagaggcgccgccgccggcggtggctgcggcggcgaaggccccctcgaagaagaggggcgcgtcagaagtgtcggacaggggctccaacaatttggaggcgacgacggggaggaagaaggtgaggacaaggttcacatggacgacggtgtcgcacacatcgtttgtcagggcatacgagcagctgaaggaccaagaaggtccaaagaagataaagcaactgatggaacttgatggtatatttgtaactaaaactcaagtctcaagccatctacagaaatacagaagctggttagaaaatgaaagaaaaaaggaagaagcaacaagcagctcaccatgcaacccactgagttacaccaactgcctagatagaggttatagtacttggaagcaaagttcagtcataactgaaggacagcaaagttcaagtttttctggacggcctattcattccatggccacatcaaatggttgtctaactacgactgatacccaagcaggcaactatgtgggagtgggagctaaagaaatcgagaatttcatttccagccatcagagatctctaggaactgcaattggtcaagaatcaactattgaacaggcaagccttcatagtgagattacatcagtcagtcgtgatgctcatgaaaatggaaacagccaggctagaggaagtgcgatgagcaatggtacttcaggtactcgtggtgtgcttgttacaaatgagaacctcctgcatgttgttagtgcatcgttgccatcaaacatgggacagccaacgcaaccaagtcaaagcttctgcaccaatgaattggcagctaactacagtattattagtgatcaaaaccctgggactagccatccaactagctctagtgctatcaataatcaaaactctaagacccaagaaatgtctgtttcacaaacagtagaacttgggtgtggcaacgatgtgatgttggattggccagaattagttggactggaagatcagctggataatgatgtgctaatgaacagcttctttgatggagacttactccagcagggtgtagttactgctatagatgggacgcaagagatgcttgcttttgattctaccggtgacttgggctcagtgccgccaagaggccttaacaacgaaattgccagccatgagaataccaatggaaagaacggcgcatctagtggaccttga

SEQ ID NO: 474 - protein, 620 aa, Oryza sativa
MAENNGAVPPGCKLPAGGFFGRLHVLVVDDDAAYLEELKLMLLLAGYAVTGKTTAEEALKEVDQNPEDYFHIVMTDVHMSGMDGFDLLHRINGRVPVIMFSEGEDVVMVMRTVMNGACDYMVKPMTSEAIKFIWKHVLRWRLSALPANASSSLQPSDHLAAALAAVAPPPPPAVQLPAAPAQAGNRDGEAHEEAELSTQPPALVPSGVQEAAAAVWSSRGDGQEAPPPAVAAAAKAPSKKRGASEVSDRGSNNLEATTGRKKVRTRFTWTTVSHTSFVRAYEQLKDQEGPKKIKQLMELDGIFVTKTQVSSHLQKYRSWLENERKKEEATSSSPCNPLSYTNCLDRGYSTWKQSSVITEGQQSSSFSGRPIHSMATSNGCLTTTDTQAGNYVGVGAKEIENFISSHQRSLGTAIGQESTIEQASLHSEITSVSRDAHENGNSQARGSAMSNGTSGTRGVLVTNENLLHVVSASLPSNMGQPTQPSQSFCTNELAANYSIISDQNPGTSHPTSSSAINNQNSKTQEMSVSQTVELGCGNDVMLDWPELVGLEDQLDNDVLMNSFFDGDLLQQGVVTAIDGTQEMLAFDSTGDLGSVPPRGLNNEIASHENTNGKNGASSGP

SEQ ID NO: 475 - protein, 112 aa, Artificial sequence
  pseudo response receiver domain from <SEQIDNO2, PF00072 (integrated in IPR001789)
LKVLLLDEDSNSAAEMKSRLEKMDYIVYSFCNESEALTAISSKSEGFHVAIVEVSAGNSDGVLRFLESAKDLPTIMTSNIHSLSTMMKCIALGAVEFLQKPLSDDKLKNIWQ

SEQ ID NO: 476 - protein, 56 aa, Artificial sequence
  myb-like DNA binding region, SHAQKYF class(IPR006447)
KIKVDWTPELHKKFVQAVEQLGIDQAIPSRILDLMKVEGLTRHNVASHLQKYRMHR

SEQ ID NO: 477 - protein, 42 aa, Artificial sequence
  C-terminal conserved domain
PADEVIDKVVKEAITKPWLPLPLGLKAPSTESVLDELSRQGI

SEQ ID NO: 478 - DNA, 2194 bp, Oryza sativa; identical to SEQ ID NO: 275

SEQ ID NO: 479 - DNA, 56 bp, Artificial sequence
  primer: prm10843
ggggacaagtttgtacaaaaaagcaggcttaaacaatgatttgcattgagaatgaa

SEQ ID NO: 480 - DNA, 50 bp, Artificial sequence
  primer: prm10844
ggggaccactttgtacaagaaagctgggtacatgtcatctcatctccgac

SEQ ID NO: 481 - protein, 378 aa, Solanum lycopersicum; identical to SEQ ID NO: 301

1. A method for enhancing a yield-related trait in a plant relative to a control plant, comprising modulating expression in a plant of a nucleic acid encoding a basic-Helix-Loop-Helix group 9 (bHLH9) polypeptide comprising a Helix-Loop-Helix (HLH) domain (Pfam accession number: PF00010) having at least 80%, sequence identity to any of SEQ ID NO: 181 to SEQ ID NO: 268.

2. The method of claim 1, wherein the bHLH9 binds to an E-box motif comprising the sequence of SEQ ID NO: 273 (CANNTG) or SEQ ID NO: 274 (CACGTG).

3. The method of claim 1, wherein the modulated expression is effected by introducing and expressing in a plant a nucleic acid encoding a bHLH9 polypeptide.

4. The method of claim 1, wherein the nucleic acid encoding a bHLH9 polypeptide encodes any one of the proteins listed in Table A or is a portion of such a nucleic acid, or a nucleic acid capable of hybridising with such a nucleic acid.

5. The method of claim 1, wherein the nucleic acid sequence encodes an orthologue or paralogue of any of the proteins given in Table A.

6. The method of claim 1, wherein the enhanced yield-related trait comprises increased yield, increased early vigour, increased biomass, and/or increased seed yield relative to control plants.

7. The method of claim 1, wherein the enhanced yield-related traits are trait is obtained under non-stress conditions.

8. The method of claim 1, wherein the enhanced yield-related trait is obtained under conditions of drought stress, salt stress or nitrogen deficiency.

9. The method of claim 3, wherein the nucleic acid is operably linked to a constitutive promoter, a GOS2 promoter, or a GOS2 promoter from rice.

10. The method of claim 1, wherein the nucleic acid encoding a bHLH9 polypeptide is of plant origin.

11. A plant or part thereof obtained by the method of claim 1, wherein the plant or part thereof comprises a recombinant nucleic acid encoding a bHLH9 polypeptide.

12. A construct comprising:
(1) a nucleic acid encoding a bHLH9 polypeptide as defined in claim 1;
(ii) one or more control sequences capable of driving expression of the nucleic acid sequence of (a); and optionally
(iii) a transcription termination sequence.

13. The construct of claim 12, wherein one of the control sequences is a constitutive promoter, a GOS2 promoter, or a GOS2 promoter from rice.

14. A method for making a plant having increased yield, increased early vigour, increased biomass, and/or increased seed yield relative to a control plant comprising transforming a plant with the construct of claim 12.

15. A plant, plant part or plant cell transformed with the construct of claim 12.

16. A method for the production of a transgenic plant having increased yield, increased early vigour, increased biomass, and/or increased seed yield relative to a control plant, comprising:
(i) introducing and expressing in a plant a nucleic acid encoding a bHLH9 polypeptide as defined in claim 1; and
(ii) cultivating the plant cell under conditions promoting plant growth and development; and optionally
(iii) selecting for a plant having increased yield.

17. A transgenic plant having increased yield, increased early vigour, increased biomass, and/or increased seed yield, relative to a control plant, resulting from modulated expression of a nucleic acid encoding a bHLH9 polypeptide as defined in claim 1, or a transgenic plant cell derived from said transgenic plant.

18. The transgenic plant of claim 11, or a transgenic plant cell derived thereof, wherein said plant is a crop plant, a monocot, a cereal, or rice, maize, wheat, barley, millet, rye, triticale, sorghum, emmer, spelt, secale, einkorn, teff, milo and or oats.

19. Harvestable parts of the plant of claim 18, wherein said harvestable parts are shoot biomass and/or seeds.

20. Products derived from the plant of claim 18 and/or from harvestable parts of said plant, wherein the harvestable parts are shoot biomass and/or seeds.

21. A method for increasing yield, early vigour, biomass, and/or seed yield in plants, relative to control plants, comprising transforming a plant with a nucleic acid encoding a basic-Helix-Loop-Helix group 9 (bHLH9) polypeptide.

22. An isolated nucleic acid molecule comprising:
(i) the nucleic acid of SEQ ID NO: 19, 45, 47, 165, 167 or 169;
(ii) the complement of the nucleic acid of SEQ ID NO: 19, 45, 47, 165, 167 or 169;
(iii) a nucleic acid that encodes the polypeptide of SEQ ID NO: 20, 46, 48, 166, 168 or 170, and confers enhanced yield-related traits relative to a control plant;
(iv) a nucleic acid having at least 30% sequence identity with any of the nucleic acid sequences of Table A and Table C2 and conferring an enhanced yield-related trait relative to a control plant;
(v) a nucleic acid molecule which hybridizes with a nucleic acid molecule of (i) to (iv) under stringent hybridization conditions and confers an enhanced yield-related trait relative to a control plant; or
(vi) a nucleic acid encoding a basic-Helix-Loop-Helix group 9 (bHLH9) polypeptide having at least 50% sequence identity to the amino acid sequence of SEQ ID NO: 20, 46, 48, 166, 168, or 170 or any of the other amino acid sequences in Table A and Table C2 and conferring an enhanced yield-related trait relative to a control plant.

23. An isolated polypeptide comprising:
(i) the amino acid sequence of SEQ ID NO: 20, 46, 48, 166, 168 or 170;
(ii) an amino acid sequence having at least 50% sequence identity to the amino acid sequence of SEQ ID NO: 20, 46, 48, 166, 168 or 170, or any of the other amino acid sequences in Table A and Table C2 and conferring an enhanced yield-related trait relative to a control plant;
(iii) a derivative of any of the amino acid sequences given in (i) or (ii) above.
